(19) United States
(12) Patent Application Publication
(10) Pub. No.: US 2011/0023188 A1
(43) Pub. Date: Jan. 27, 2011

(54) PLANTS HAVING ENHANCED YIELD-RELATED TRAITS AND A METHOD FOR MAKING THE SAME

(75) Inventors: Woo Taek Kim, Seoul (KR); Seok Keun Choi, Seoul (KR); In Gyu Hwang, Seoul (KR); Jae Sun Moon, Seoul (KR); Nam-Soo Jwa, Seoul (KR); Okhee Choi, Seoul (KR); Yang Do Choi, Seoul (KR); Youn-Il Park, Seoul (KR); Suck Won Chung, Seoul (KR)

Correspondence Address: CONNOLLY BOVE LODGE & HUTZ, LLP, P O BOX 2207, WILMINGTON, DE, 19899, US

(73) Assignees: BASF PLANT SCIENCE GMBH, Ludwigshafen (DE); CROP FUNCTIONAL GENOMICS CENTER, Seoul (KR)

(21) Appl. No.: 12/671,224

(22) PCT Filed: Jul. 31, 2008
(86) PCT No.: PCT/EP2008/060060

§ 371 Date: Oct. 4, 2010

Related U.S. Application Data
(60) Provisional application No. 60/970,071, filed on Sep. 5, 2007.
(60) Provisional application No. 60/970,066, filed on Sep. 5, 2007.
(60) Provisional application No. 60/975,876, filed on Sep. 28, 2007.

(30) Foreign Application Priority Data
Jul. 31, 2007 (EP) 07113570.1
Jul. 31, 2007 (EP) 07113571.9
Sep. 18, 2007 (EP) 07116620.1

(51) Int. Cl. C12N 15/82; A01H 5/00; C12N 5/10; A01H 5/10

(52) U.S. Cl. 800/290; 435/320.1; 800/298; 435/419; 800/320.2; 800/320.1; 800/320.3; 800/320

(57) ABSTRACT

The present invention relates generally to the field of molecular biology and concerns a method for enhancing yield-related traits in plants by modulating expression in a plant of a nucleic acid encoding a yield increasing polypeptide selected from the group consisting of: phosphoenolpyruvate carboxylase (PEPC), Class III U-Box protein and PQQC protein. The present invention also concerns plants having modulated expression of a nucleic acid encoding yield increasing polypeptide selected from the group consisting of: phosphoenolpyruvate carboxylase (PEPC), Class III U-Box protein and PQQC protein, which plants have enhanced yield-related traits relative to corresponding wild type plants or other control plants. The invention also provides constructs useful in the methods of the invention.

[0001] The present invention relates generally to the field of molecular biology and concerns a method for enhancing yield-related traits in plants by modulating expression in a plant of a nucleic acid encoding a yield increasing polypeptide selected from the group consisting of:

phosphoenolpyruvate carboxylase (PEPC),
Class III U-Box protein and
PQQC protein. The present invention also concerns plants having modulated expression of a nucleic acid encoding a yield increasing polypeptide, which plants have enhanced yield-related traits relative to corresponding wild type plants or other control plants. The invention also provides constructs useful in the methods of the invention.

[0002] The ever-increasing world population and the dwindling supply of arable land available for agriculture fuels research towards increasing the efficiency of agriculture. Conventional means for crop and horticultural improvements utilise selective breeding techniques to identify plants having desirable characteristics. However, such selective breeding techniques have several drawbacks, namely that these techniques are typically labour intensive and result in plants that often contain heterogeneous genetic components that may not always result in the desirable trait being passed on from parent plants. Advances in molecular biology have allowed mankind to modify the germplasm of animals and plants. Genetic engineering of plants entails the isolation and manipulation of genetic material (typically in the form of DNA or RNA) and the subsequent introduction of that genetic material into a plant. Such technology has the capacity to deliver crops or plants having various improved economic, agronomic or horticultural traits.

[0003] A trait of particular economic interest is increased yield. Yield is normally defined as the measurable produce of economic value from a crop. This may be defined in terms of quantity and/or quality. Yield is directly dependent on several factors, for example, the number and size of the organs, plant architecture (for example, the number of branches), seed production, leaf senescence and more. Root development, nutrient uptake, stress tolerance and early vigour may also be important factors in determining yield. Optimizing the abovementioned factors may therefore contribute to increasing crop yield.

[0004] Seed yield is a particularly important trait, since the seeds of many plants are important for human and animal nutrition. Crops such as corn, rice, wheat, canola and soybean account for over half the total human caloric intake, whether through direct consumption of the seeds themselves or through consumption of meat products raised on processed seeds. They are also a source of sugars, oils and many kinds of metabolites used in industrial processes. Seeds contain an embryo (the source of new shoots and roots) and an endosperm (the source of nutrients for embryo growth during germination and during early growth of seedlings). The development of a seed involves many genes, and requires the transfer of metabolites from the roots, leaves and stems into the growing seed. The endosperm, in particular, assimilates the metabolic precursors of carbohydrates, oils and proteins and synthesizes them into storage macromolecules to fill out the grain.

[0005] Another important trait for many crops is early vigour. Improving early vigour is an important objective of modern rice breeding programs in both temperate and tropical rice cultivars. Long roots are important for proper soil anchorage in water-seeded rice. Where rice is sown directly into flooded fields, and where plants must emerge rapidly through water, longer shoots are associated with vigour. Where drill-seeding is practiced, longer mesocotyls and coleoptiles are important for good seedling emergence. The ability to engineer early vigour into plants would be of great importance in agriculture. For example, poor early vigour has been a limitation to the introduction of maize (Zea mays L.) hybrids based on Corn Belt germplasm in the European Atlantic.

[0006] A further important trait is that of improved abiotic stress tolerance. Abiotic stress is a primary cause of crop loss worldwide, reducing average yields for most major crop plants by more than 50% (Wang et al., Planta (2003) 218: 1-14). Abiotic stresses may be caused by drought, salinity, extremes of temperature, chemical toxicity and oxidative stress. The ability to improve plant tolerance to abiotic stress would be of great economic advantage to farmers worldwide and would allow for the cultivation of crops during adverse conditions and in territories where cultivation of crops may not otherwise be possible.

[0007] Crop yield may therefore be increased by optimising one of the above-mentioned factors.

[0008] Depending on the end use, the modification of certain yield traits may be favoured over others. For example, for applications such as forage or wood production, or for bio-fuel production, an increase in the vegetative parts of a plant may be desirable, and for applications such as flour, starch or oil production, an increase or improvement of seed parameters may be particularly desirable. Even amongst the seed parameters, some may be favoured over others, depending on the end application. Various mechanisms may contribute to increasing seed yield, whether that is in the form of increased seed size or increased seed number or any other seed-related trait.

[0009] One approach to increasing yield (seed yield and/or biomass) in plants may be through modification of the inherent growth mechanisms of a plant, such as the cell cycle or various signalling pathways involved in plant growth or in defense mechanisms.

[0010] It has now been found that yield-related traits may be enhanced in plants by modulating expression in a plant of a nucleic acid encoding a yield increasing polypeptide selected from the group consisting of:

phosphoenolpyruvate carboxylase (PEPC),
Class III U-Box protein and
PQQC protein.

### BACKGROUND

[0011] Phosphoenolpyruvate carboxylase (also known as PEP carboxylase, PEPCase, or PEPC; EC 4.1.1.31) is an enzyme in the family of carboxy-lyases that catalyzes the addition of CO₂ to phosphoenolpyruvate (PEP) to form the four-carbon compound oxaloacetate:

PEP+CO₂→oxaloacetate+Pi

[0012] This reaction is used for carbon fixation in so-called “CAM” and “C4” plants where it plays a key role in photosynthesis. Besides plants, the enzyme is also found in some bacteria, but not in animals or fungi.

[0013] Carbon fixation via PEP carboxylase assimilates the available CO₂ into a four-carbon compound (oxaloacetate, which is further converted to malate) that can be stored or shuttled between plant cells. This allows for a separation of initial CO₂ fixation by contact with air and secondary CO₂ fixation into sugars by RuBisCO during the light-independent reactions of photosynthesis.

[0014] In succulent CAM plants adapted for growth in very dry conditions, PEP carboxylase fixes CO₂ during the night when the plant opens its stomata to allow for gas exchange. During the day time, the plant closes the stomata to preserve water and releases CO₂ inside the leaf from the storage compounds produced during the night. This allows the plants to thrive in dry climates by conducting photosynthesis without losing water through open stomata during the day.

[0015] In C4 plants, for example maize, PEP carboxylase fixes CO₂ in the mesophyll cells of the leaf and the resulting four-carbon compound shuttles into the bundle sheath cells where it releases CO₂ for fixation by RuBisCO. Thus, the two processes are separated spatially, allowing for RuBisCO to operate in a low-oxygen environment to circumvent photorespiration. Photorespiration occurs due to the inherent oxygenase activity of RuBisCO in which the enzyme uses oxygen instead of carbon dioxide without incorporating carbon into sugars or generating ATP. As such, it is a wasteful reaction for the plant. By comparison, C4 carbon fixation via PEP carboxylase is more efficient.

[0016] Radchuk et al., 2007 (The Plant Journal 51, 819-839) reported the overexpression of Corynebacterium PEPC in Vicia narbonensis seeds to alter seed metabolism and channel carbon into organic acids, resulting in greater seed storage capacity and increased protein content.

[0017] The U-box is a domain of ˜70 amino acids that is present from yeast to humans. The prototype U-box protein, yeast Ufd2, was identified as a ubiquitin chain assembly factor (E4) that cooperates with a ubiquitin-activating enzyme (E1), a ubiquitin-conjugating enzyme (E2), and an E3 to catalyze the formation of a ubiquitin chain on artificial substrates, Hatakeyama et al., 2003 (Biochemical and Biophysical Research Communications 302, pp 635-645). Azevedo et al. 2001 (Trends in Plant Science Vol. 6 No. 8). report that a database search revealed 37 predicted proteins containing a U-box in Arabidopsis, although UFD2 is reportedly the only U-box protein in yeast, and only a few have been identified in the human genome and in the genomes of Caenorhabditis elegans and Drosophila melanogaster. Based on domain analysis, the plant U-box (PUB) proteins were found to form five distinct subclasses. Class III was found to consist of 12 members with a domain containing ˜14% leucine residues. The U-box domain in Class III members was found at the N-terminal region, in contrast to its position in other Class members.

[0018] The U-box proteins are predicted to be either E3 or E4 factors in the ubiquitination machinery

[0019] Cho et al., 2006 (Plant Physiology, December 2006, Vol. 142, pp. 1664-1682) isolated a putative U-box protein 1 (CaPUB1) from water-stressed hot pepper (Capsicum annuum L. cv Pukang), encoding a protein containing a single U-box motif in its N-terminal region. In vitro ubiquitination and site-directed mutagenesis assays revealed that CaPUB1 possessed E3 ubiquitin ligase activity and that the U-box motif was essential for its enzyme activity. They overexpressed in Arabidopsis CaPUB1 under the control of the Cauliflower mosaic virus 35S promoter. Transgenic Arabidopsis plants were reported to have markedly longer hypocotyls and roots and grew more rapidly than the wild type, leading to an early bolting phenotype. The morphology of cotyledons was found to be similar in the dark. The roots of 35S::CaPUB1 were shown to have increased number of small sized cells resulting in disordered, highly populated cell layers in the cortex, endodermis and stele. Transgenic plants also displayed increased sensitivity to water stress and mild salinity.

[0020] PqqC facilitates cyclization and oxidation of 3a-(2-amino-2-carboxyethyl)-4,5-dioxo-4,5,6,7,8,9-hexahydroquinoline-7,9-dicarboxylic acid to PQQ in a reaction that occurs in the absence of any apparent cofactor. Pyrroloquinoline quinone [4,5-dihydro-4,5-dioxo-1H-pyrrolo-[2,3-f]quinoline-2,7,9-tricarboxylic acid; PQQ] is an aromatic, tricyclic ortho-quinone that serves as the redox cofactor for several bacterial dehydrogenases. Among the best known examples are methanol dehydrogenase and glucose dehydrogenase. PQQ belongs to the family of quinone cofactors that has been recognized as the third class of redox cofactors following pyridine nucleotide- and flavin-dependent cofactors. Although plants and animals do not produce PQQ themselves, PQQ has invoked considerable interest because of its presence in human milk and its antioxidant properties.

[0021] Genes involved in PQQ synthesis have been cloned from Acinetobacter calcoaceticus, Klebsiella, Pseudomonas Fluorescens, Methylobacterium organophilum and Methylobacterium extorquens.

[0022] PqqCcatalyses the last step in PQQ biosynthesis. PqqC is a 251-residue protein (molecular mass 28.91 kDa) that forms a homodimer in solution, as evident from gel filtration experiments. PqqC folds into a compact seven-helix bundle, with six circular aligned helices, partly embracing a seventh hydrophobic helix. Analysis of the PqqC structure shows that the seven helices provide the scaffold for an active site cavity. The cavity is lined with 42 mostly hydrophilic and aromatic residues that are highly conserved within PqqC proteins from different bacteria. The cavity shows a distinct overall positive charge.

### SUMMARY

[0023] Surprisingly, it has now been found that modulating expression of a nucleic acid encoding a yield increasing polypeptide selected from the group consisting of:

phosphoenolpyruvate carboxylase (PEPC),
Class III U-Box protein and
PQQC protein gives plants having enhanced yield-related traits, in particular increased yield relative to control plants.

[0024] It was particularly surprising to find that the increase in yield was not manifested in the form of bigger seeds, as might have been expected from the teachings of Radchuck et al., 2007, but was manifested in the form of an array of altered yield-related traits including, but not limited to, increased aboveground area, increased emergence vigour, increased total number of seeds, increased seed weight, increased fill rate, increased number of flowers per panicle, increased number of seeds, increased harvest index, increased height and an increase in the root thickness, each relative to control plants.

[0025] According one embodiment, there is provided a method for enhancing yield related traits in plants relative to control plants, comprising modulating expression of a nucleic acid encoding a PEPC protein in a plant.

[0026] According one embodiment, there is provided a method for enhancing yield related traits, in particular increased yield in plants relative to control plants, comprising modulating expression of a nucleic acid encoding a Class III U-Box protein in a plant.

[0027] According one embodiment, there is provided a method for enhancing yield related traits, in particular increased yield in plants relative to control plants, comprising modulating expression of a nucleic acid encoding a PQQC protein in a plant.

### DEFINITIONS

### Polypeptide(s)/Protein(s)

[0028] The terms “polypeptide” and “protein” are used interchangeably herein and refer to amino acids in a polymeric form of any length, linked together by peptide bonds.

### Polynucleotide(s)/Nucleic Acid(s)/Nucleic Acid Sequence(s)/Nucleotide Sequence(s)

[0029] The terms “polynucleotide(s)”, “nucleic acid sequence(s)”, “nucleotide sequence(s)”, “nucleic acid(s)”, “nucleic acid molecule” are used interchangeably herein and refer to nucleotides, either ribonucleotides or deoxyribonucleotides or a combination of both, in a polymeric unbranched form of any length.

### Control Plant(s)

[0030] The choice of suitable control plants is a routine part of an experimental setup and may include corresponding wild type plants or corresponding plants without the gene of interest. The control plant is typically of the same plant species or even of the same variety as the plant to be assessed. The control plant may also be a nullizygote of the plant to be assessed. Nullizygotes are individuals missing the transgene by segregation. A “control plant” as used herein refers not only to whole plants, but also to plant parts, including seeds and seed parts.

### Homologue(s)

[0031] “Homologues” of a protein encompass peptides, oligopeptides, polypeptides, proteins and enzymes having amino acid substitutions, deletions and/or insertions relative to the unmodified protein in question and having similar biological and functional activity as the unmodified protein from which they are derived.

[0032] A deletion refers to removal of one or more amino acids from a protein.

[0033] An insertion refers to one or more amino acid residues being introduced into a predetermined site in a protein. Insertions may comprise N-terminal and/or C-terminal fusions as well as intra-sequence insertions of single or multiple amino acids. Generally, insertions within the amino acid sequence will be smaller than N- or C-terminal fusions, of the order of about 1 to 10 residues. Examples of N- or C-terminal fusion proteins or peptides include the binding domain or activation domain of a transcriptional activator as used in the yeast two-hybrid system, phage coat proteins, (histidine)-6-tag, glutathione S-transferase-tag, protein A, maltose-binding protein, dihydrofolate reductase, Tag.100 epitope, c-myc epitope, FLAG®-epitope, lacZ, CMP (calmodulin-binding peptide), HA epitope, protein C epitope and VSV epitope.

[0034] A substitution refers to replacement of amino acids of the protein with other amino acids having similar properties (such as similar hydrophobicity, hydrophilicity, antigenicity, propensity to form or break α-helical structures or β-sheet structures). Amino acid substitutions are typically of single residues, but may be clustered depending upon functional constraints placed upon the polypeptide; insertions will usually be of the order of about 1 to 10 amino acid residues. For large proteins, the number of insertions may even be in the order of 50, 100, 150, 200 or more. The amino acid substitutions are preferably conservative amino acid substitutions. Conservative substitution tables are well known in the art (see for example Creighton (1984) Proteins. W.H. Freeman and Company (Eds) and Table 1 below).

TABLE 1
Examples of conserved amino acid substitutions

| | Conservative | | Conservative |
|---|---|---|---|
| Residue | Substitutions | Residue | Substitutions |
| Ala | Ser | Leu | Ile; Val |
| Arg | Lys | Lys | Arg; Gln |
| Asn | Gln; His | Met | Leu; Ile |
| Asp | Glu | Phe | Met; Leu; Tyr |
| Gln | Asn | Ser | Thr; Gly |
| Cys | Ser | Thr | Ser; Val |
| Glu | Asp | Trp | Tyr |
| Gly | Pro | Tyr | Trp; Phe |
| His | Asn; Gln | Val | Ile; Leu |
| Ile | Leu, Val | | |

[0035] Amino acid substitutions, deletions and/or insertions may readily be made using peptide synthetic techniques well known in the art, such as solid phase peptide synthesis and the like, or by recombinant DNA manipulation. Methods for the manipulation of DNA sequences to produce substitution, insertion or deletion variants of a protein are well known in the art. For example, techniques for making substitution mutations at predetermined sites in DNA are well known to those skilled in the art and include M13 mutagenesis, T7-Gen in vitro mutagenesis (USB, Cleveland, Ohio), QuickChange Site Directed mutagenesis (Stratagene, San Diego, Calif.), PCR-mediated site-directed mutagenesis or other site-directed mutagenesis protocols.

### Derivatives

[0036] “Derivatives” include peptides, oligopeptides, polypeptides which may, compared to the amino acid sequence of the naturally-occurring form of the protein, such as the protein of interest, comprise substitutions of amino acids with non-naturally occurring amino acid residues, or additions of non-naturally occurring amino acid residues. “Derivatives” of a protein also encompass peptides, oligopeptides, polypeptides which comprise naturally occurring altered (glycosylated, acylated, prenylated, phosphorylated, myristoylated, sulphated etc.) or non-naturally altered amino acid residues compared to the amino acid sequence of a naturally-occurring form of the polypeptide. A derivative may also comprise one or more non-amino acid substituents or additions compared to the amino acid sequence from which it is derived, for example a reporter molecule or other ligand, covalently or non-covalently bound to the amino acid sequence, such as a reporter molecule which is bound to facilitate its detection, and non-naturally occurring amino acid residues relative to the amino acid sequence of a naturally-occurring protein. Furthermore, “derivatives” also include fusions of the naturally-occurring form of the protein with tagging peptides such as FLAG, HIS6 or thioredoxin (for a review of tagging peptides, see Terpe, Appl. Microbiol. Biotechnol. 60, 523-533, 2003).

### Orthologue(s)/Paralogue(s)

[0037] Orthologues and paralogues encompass evolutionary concepts used to describe the ancestral relationships of genes. Paralogues are genes within the same species that have originated through duplication of an ancestral gene; orthologues are genes from different organisms that have originated through speciation, and are also derived from a common ancestral gene.

### Domain

[0038] The term “domain” refers to a set of amino acids conserved at specific positions along an alignment of sequences of evolutionarily related proteins. While amino acids at other positions can vary between homologues, amino acids that are highly conserved at specific positions indicate amino acids that are likely essential in the structure, stability or function of a protein. Identified by their high degree of conservation in aligned sequences of a family of protein homologues, they can be used as identifiers to determine if any polypeptide in question belongs to a previously identified polypeptide family.

### Motif/Consensus Sequence/Signature

[0039] The term “motif” or “consensus sequence” or “signature” refers to a short conserved region in the sequence of evolutionarily related proteins. Motifs are frequently highly conserved parts of domains, but may also include only part of the domain, or be located outside of conserved domain (if all of the amino acids of the motif fall outside of a defined domain).

### Hybridisation

[0040] The term “hybridisation” as defined herein is a process wherein substantially homologous complementary nucleotide sequences anneal to each other. The hybridisation process can occur entirely in solution, i.e. both complementary nucleic acids are in solution. The hybridisation process can also occur with one of the complementary nucleic acids immobilised to a matrix such as magnetic beads, Sepharose beads or any other resin. The hybridisation process can furthermore occur with one of the complementary nucleic acids immobilised to a solid support such as a nitro-cellulose or nylon membrane or immobilised by e.g. photolithography to, for example, a siliceous glass support (the latter known as nucleic acid arrays or microarrays or as nucleic acid chips). In order to allow hybridisation to occur, the nucleic acid molecules are generally thermally or chemically denatured to melt a double strand into two single strands and/or to remove hairpins or other secondary structures from single stranded nucleic acids.

[0041] The term “stringency” refers to the conditions under which a hybridisation takes place. The stringency of hybridisation is influenced by conditions such as temperature, salt concentration, ionic strength and hybridisation buffer composition. Generally, low stringency conditions are selected to be about 30° C. lower than the thermal melting point (Tₘ) for the specific sequence at a defined ionic strength and pH. Medium stringency conditions are when the temperature is 20° C. below Tₘ, and high stringency conditions are when the temperature is 10° C. below Tₘ. High stringency hybridisation conditions are typically used for isolating hybridising sequences that have high sequence similarity to the target nucleic acid sequence. However, nucleic acids may deviate in sequence and still encode a substantially identical polypeptide, due to the degeneracy of the genetic code. Therefore medium stringency hybridisation conditions may sometimes be needed to identify such nucleic acid molecules.

[0042] The Tm is the temperature under defined ionic strength and pH, at which 50% of the target sequence hybridises to a perfectly matched probe. The Tₘ is dependent upon the solution conditions and the base composition and length of the probe. For example, longer sequences hybridise specifically at higher temperatures. The maximum rate of hybridisation is obtained from about 16° C. up to 32° C. below Tₘ. The presence of monovalent cations in the hybridisation solution reduce the electrostatic repulsion between the two nucleic acid strands thereby promoting hybrid formation; this effect is visible for sodium concentrations of up to 0.4M (for higher concentrations, this effect may be ignored). Formamide reduces the melting temperature of DNA-DNA and DNA-RNA duplexes with 0.6 to 0.7° C. for each percent formamide, and addition of 50% formamide allows hybridisation to be performed at 30 to 45° C., though the rate of hybridisation will be lowered. Base pair mismatches reduce the hybridisation rate and the thermal stability of the duplexes. On average and for large probes, the Tm decreases about 1° C. per % base mismatch. The Tm may be calculated using the following equations, depending on the types of hybrids:

1) DNA-DNA hybrids (Meinkoth and Wahl, Anal. Biochem., 138: 267-284, 1984):

Tₘ=81.5° C.+16.6×log₁₀[Na⁺]^{a}+0.41×%[G/C^{b}]−500×[L^{c}]⁻¹−0.61×% formamide

^{a} or for other monovalent cation, but only accurate in the 0.01-0.4 M range.^{b} only accurate for % GC in the 30% to 75% range.^{c} L=length of duplex in base pairs.
2) DNA-RNA or RNA-RNA hybrids:

Tm=79.8+18.5(log₁₀[Na⁺]^{a})+0.58(%G/C^{b})+11.8(%G/C^{b})²−820/L^{c}

^{a} or for other monovalent cation, but only accurate in the 0.01-0.4 M range.^{b} only accurate for % GC in the 30% to 75% range.^{c} L=length of duplex in base pairs.
3) oligo-DNA or oligo-RNA^{d} hybrids:

For <20 nucleotides: Tₘ=2(lₙ)

For 20-35 nucleotides: Tₘ=22+1.46(lₙ)

^{d} oligo, oligonucleotide; In, =effective length of primer=2×(no. of G/C)+(no. of NT).

[0043] Non-specific binding may be controlled using any one of a number of known techniques such as, for example, blocking the membrane with protein containing solutions, additions of heterologous RNA, DNA, and SDS to the hybridisation buffer, and treatment with Rnase. For non-homologous probes, a series of hybridizations may be performed by varying one of (i) progressively lowering the annealing temperature (for example from 68° C. to 42° C.) or (ii) progressively lowering the formamide concentration (for example from 50% to 0%). The skilled artisan is aware of various parameters which may be altered during hybridisation and which will either maintain or change the stringency conditions.

[0044] Besides the hybridisation conditions, specificity of hybridisation typically also depends on the function of post-hybridisation washes. To remove background resulting from non-specific hybridisation, samples are washed with dilute salt solutions. Critical factors of such washes include the ionic strength and temperature of the final wash solution: the lower the salt concentration and the higher the wash temperature, the higher the stringency of the wash. Wash conditions are typically performed at or below hybridisation stringency. A positive hybridisation gives a signal that is at least twice of that of the background. Generally, suitable stringent conditions for nucleic acid hybridisation assays or gene amplification detection procedures are as set forth above. More or less stringent conditions may also be selected. The skilled artisan is aware of various parameters which may be altered during washing and which will either maintain or change the stringency conditions.

[0045] For example, typical high stringency hybridisation conditions for DNA hybrids longer than 50 nucleotides encompass hybridisation at 65° C. in 1×SSC or at 42° C. in 1×SSC and 50% formamide, followed by washing at 65° C. in 0.3×SSC. Examples of medium stringency hybridisation conditions for DNA hybrids longer than 50 nucleotides encompass hybridisation at 50° C. in 4×SSC or at 40° C. in 6×SSC and 50% formamide, followed by washing at 50° C. in 2×SSC. The length of the hybrid is the anticipated length for the hybridising nucleic acid. When nucleic acids of known sequence are hybridised, the hybrid length may be determined by aligning the sequences and identifying the conserved regions described herein. 1×SSC is 0.15M NaCl and 15 mM sodium citrate; the hybridisation solution and wash solutions may additionally include 5×Denhardt's reagent, 0.5-1.0% SDS, 100 μg/ml denatured, fragmented salmon sperm DNA, 0.5% sodium pyrophosphate.

[0046] For the purposes of defining the level of stringency, reference can be made to Sambrook et al. (2001) Molecular Cloning: a laboratory manual, 3^{rd} Edition, Cold Spring Harbor Laboratory Press, CSH, New York or to Current Protocols in Molecular Biology, John Wiley & Sons, N.Y. (1989 and yearly updates).

### Splice Variant

[0047] The term “splice variant” as used herein encompasses variants of a nucleic acid sequence in which selected introns and/or exons have been excised, replaced, displaced or added, or in which introns have been shortened or lengthened. Such variants will be ones in which the biological activity of the protein is substantially retained; this may be achieved by selectively retaining functional segments of the protein. Such splice variants may be found in nature or may be manmade. Methods for predicting and isolating such splice variants are well known in the art (see for example Foissac and Schiex (2005) BMC Bioinformatics 6: 25).

### Allelic Variant

[0048] Alleles or allelic variants are alternative forms of a given gene, located at the same chromosomal position. Allelic variants encompass Single Nucleotide Polymorphisms (SNPs), as well as Small Insertion/Deletion Polymorphisms (INDELs). The size of INDELs is usually less than 100 bp. SNPs and INDELs form the largest set of sequence variants in naturally occurring polymorphic strains of most organisms.

### Gene Shuffling/Directed Evolution

[0049] Gene shuffling or directed evolution consists of iterations of DNA shuffling followed by appropriate screening and/or selection to generate variants of nucleic acids or portions thereof encoding proteins having a modified biological activity (Castle et al., (2004) Science 304(5674): 1151-4; U.S. Pat. Nos. 5,811,238 and 6,395,547).

### Regulatory Element/Control Sequence/Promoter

[0050] The terms “regulatory element”, “control sequence” and “promoter” are all used interchangeably herein and are to be taken in a broad context to refer to regulatory nucleic acid sequences capable of effecting expression of the sequences to which they are ligated. The term “promoter” typically refers to a nucleic acid control sequence located upstream from the transcriptional start of a gene and which is involved in recognising and binding of RNA polymerase and other proteins, thereby directing transcription of an operably linked nucleic acid. Encompassed by the aforementioned terms are transcriptional regulatory sequences derived from a classical eukaryotic genomic gene (including the TATA box which is required for accurate transcription initiation, with or without a CCAAT box sequence) and additional regulatory elements (i.e. upstream activating sequences, enhancers and silencers) which alter gene expression in response to developmental and/or external stimuli, or in a tissue-specific manner. Also included within the term is a transcriptional regulatory sequence of a classical prokaryotic gene, in which case it may include a −35 box sequence and/or −10 box transcriptional regulatory sequences. The term “regulatory element” also encompasses a synthetic fusion molecule or derivative that confers, activates or enhances expression of a nucleic acid molecule in a cell, tissue or organ.

[0051] A “plant promoter” comprises regulatory elements, which mediate the expression of a coding sequence segment in plant cells. Accordingly, a plant promoter need not be of plant origin, but may originate from viruses or micro-organisms, for example from viruses which attack plant cells. The “plant promoter” can also originate from a plant cell, e.g. from the plant which is transformed with the nucleic acid sequence to be expressed in the inventive process and described herein. This also applies to other “plant” regulatory signals, such as “plant” terminators. The promoters upstream of the nucleotide sequences useful in the methods of the present invention can be modified by one or more nucleotide substitution(s), insertion(s) and/or deletion(s) without interfering with the functionality or activity of either the promoters, the open reading frame (ORF) or the 3′-regulatory region such as terminators or other 3′ regulatory regions which are located away from the ORF. It is furthermore possible that the activity of the promoters is increased by modification of their sequence, or that they are replaced completely by more active promoters, even promoters from heterologous organisms. For expression in plants, the nucleic acid molecule must, as described above, be linked operably to or comprise a suitable promoter which expresses the gene at the right point in time and with the required spatial expression pattern.

[0052] For the identification of functionally equivalent promoters, the promoter strength and/or expression pattern of a candidate promoter may be analysed for example by operably linking the promoter to a reporter gene and assaying the expression level and pattern of the reporter gene in various tissues of the plant. Suitable well-known reporter genes include for example beta-glucuronidase or beta-galactosidase. The promoter activity is assayed by measuring the enzymatic activity of the beta-glucuronidase or beta-galactosidase. The promoter strength and/or expression pattern may then be compared to that of a reference promoter (such as the one used in the methods of the present invention). Alternatively, promoter strength may be assayed by quantifying mRNA levels or by comparing mRNA levels of the nucleic acid used in the methods of the present invention, with mRNA levels of housekeeping genes such as 18S rRNA, using methods known in the art, such as Northern blotting with densitometric analysis of autoradiograms, quantitative real-time PCR or RT-PCR (Heid et al., 1996 Genome Methods 6: 986-994). Generally by “weak promoter” is intended a promoter that drives expression of a coding sequence at a low level. By “low level” is intended at levels of about 1/10,000 transcripts to about 1/100,000 transcripts, to about 1/500,0000 transcripts per cell. Conversely, a “strong promoter” drives expression of a coding sequence at high level, or at about 1/10 transcripts to about 1/100 transcripts to about 1/1000 transcripts per cell.

### Operably Linked

[0053] The term “operably linked” as used herein refers to a functional linkage between the promoter sequence and the gene of interest, such that the promoter sequence is able to initiate transcription of the gene of interest.

### Constitutive Promoter

[0054] A “constitutive promoter” refers to a promoter that is transcriptionally active during most, but not necessarily all, phases of growth and development and under most environmental conditions, in at least one cell, tissue or organ. Table 2a below gives examples of constitutive promoters.

TABLE 2a
Examples of constitutive promoters

| Gene Source | Reference |
|---|---|
| Actin | McElroy et al, Plant Cell, 2: 163-171, 1990 |
| HMGP | WO 2004/070039 |
| CAMV 35S | Odell et al, Nature, 313: 810-812, 1985 |
| CaMV 19S | Nilsson et al., Physiol. Plant. 100: 456-462, 1997 |
| GOS2 | de Pater et al, Plant J Nov; 2(6): 837-44, 1992, WO 2004/065596 |
| Ubiquitin | Christensen et al, Plant Mol. Biol. 18: 675-689, 1992 |
| Rice cyclophilin | Buchholz et al, Plant Mol Biol. 25(5): 837-43, 1994 |
| Maize H3 histone | Lepetit et al, Mol. Gen. Genet. 231: 276-285, 1992 |
| Alfalfa H3 histone | Wu et al. Plant Mol. Biol. 11: 641-649, 1988 |
| Actin 2 | An et al, Plant J. 10(1); 107-121, 1996 |
| 34S FMV | Sanger et al., Plant. Mol. Biol., 14, 1990: 433-443 |
| Rubisco small subunit | U.S. Pat. No. 4,962,028 |
| OCS | Leisner (1988) Proc Natl Acad Sci USA 85(5): 2553 |
| SAD1 | Jain et al., Crop Science, 39 (6), 1999: 1696 |
| SAD2 | Jain et al., Crop Science, 39 (6), 1999: 1696 |
| nos | Shaw et al. (1984) Nucleic Acids Res. 12(20): 7831-7846 |
| V-ATPase | WO 01/14572 |
| Super promoter | WO 95/14098 |
| G-box proteins | WO 94/12015 |

### Ubiquitous Promoter

[0055] A ubiquitous promoter is active in substantially all tissues or cells of an organism.

### Developmentally-Regulated Promoter

[0056] A developmentally-regulated promoter is active during certain developmental stages or in parts of the plant that undergo developmental changes.

### Inducible Promoter

[0057] An inducible promoter has induced or increased transcription initiation in response to a chemical (for a review see Gatz 1997, Annu. Rev. Plant Physiol. Plant Mol. Biol., 48:89-108), environmental or physical stimulus, or may be “stress-inducible”, i.e. activated when a plant is exposed to various stress conditions, or a “pathogen-inducible” i.e. activated when a plant is exposed to exposure to various pathogens.

### Organ-Specific/Tissue-Specific Promoter

[0058] An organ-specific or tissue-specific promoter is one that is capable of preferentially initiating transcription in certain organs or tissues, such as the leaves, roots, seed tissue etc. For example, a “root-specific promoter” is a promoter that is transcriptionally active predominantly in plant roots, substantially to the exclusion of any other parts of a plant, whilst still allowing for any leaky expression in these other plant parts. Promoters able to initiate transcription in certain cells only are referred to herein as “cell-specific”.

[0059] Examples of root-specific promoters are listed in Table 2b below:

TABLE 2b
Examples of root-specific promoters

| Gene Source | Reference |
|---|---|
| RCc3 | Plant Mol Biol. 1995 Jan; 27(2): 237-48 |
| Arabidopsis phosphate transporter PHT1 | Kovama et al., 2005 |
| Medicago phosphate transporter | Xiao et al., 2006 |
| Arabidopsis Pyk10 | Nitz et al. (2001) Plant Sci 161(2): 337-346 |

[0060] A seed-specific promoter is transcriptionally active predominantly in seed tissue, but not necessarily exclusively in seed tissue (in case of leaky expression). The seed-specific promoter may be active during seed development and/or during germination. The seed specific promoter may be endosperm/aleurone/embryo specific. Examples of seed-specific promoters are shown in Tables 2c, d, e and f below. Further examples of seed-specific promoters are given in Qing Qu and Takaiwa (Plant Biotechnol. J. 2, 113-125, 2004), which disclosure is incorporated by reference herein as if fully set forth.

TABLE 2c
Examples of seed-specific promoters

| Gene source | Reference |
|---|---|
| seed-specific genes | Simon et al., Plant Mol. Biol. 5: 191, 1985; |
| | Scofield et al., J. Biol. Chem. 262: 12202, 1987.; |
| | Baszczynski et al., Plant Mol. Biol. 14: 633, 1990. |
| Brazil Nut albumin | Pearson et al., Plant Mol. Biol. 18: 235-245, 1992. |
| legumin | Ellis et al., Plant Mol. Biol. 10: 203-214, 1988. |
| glutelin (rice) | Takaiwa et al., Mol. Gen. Genet. 208: 15-22, 1986; |
| | Takaiwa et al., FEBS Letts. 221: 43-47, 1987. |
| zein | Matzke et al Plant Mol Biol, 14(3): 323-32 1990 |
| napA | Stalberg et al, Planta 199: 515-519, 1996. |
| wheat LMW and HMW glutenin-1 | Mol Gen Genet 216: 81-90, 1989; NAR 17: 461-2, 1989 |
| wheat SPA | Albani et al, Plant Cell, 9: 171-184, 1997 |
| wheat α, β, γ-gliadins | EMBO J. 3: 1409-15, 1984 |
| barley Itr1 promoter | Diaz et al. (1995) Mol Gen Genet 248(5): 592-8 |
| barley B1, C, D, hordein | Theor Appl Gen 98: 1253-62, 1999; Plant J 4: 343-55, |
| | 1993; Mol Gen Genet 250: 750-60, 1996 |
| barley DOF | Mena et al, The Plant Journal, 116(1): 53-62, 1998 |
| blz2 | EP99106056.7 |
| synthetic promoter | Vicente-Carbajosa et al., Plant J. 13: 629-640, 1998. |
| rice prolamin NRP33 | Wu et al, Plant Cell Physiology 39(8) 885-889, 1998 |
| rice a-globulin Glb-1 | Wu et al, Plant Cell Physiology 39(8) 885-889, 1998 |
| rice OSH1 | Sato et al, Proc. Natl. Acad. Sci. USA, 93: 8117-8122, |
| | 1996 |
| rice α-globulin REB/OHP-1 | Nakase et al. Plant Mol. Biol. 33: 513-522, 1997 |
| rice ADP-glucose pyrophos- | Trans Res 6: 157-68, 1997 |
| phorylase | |
| maize ESR gene family | Plant J 12: 235-46, 1997 |
| sorghum α-kafirin | DeRose et al., Plant Mol. Biol 32: 1029-35, 1996 |
| KNOX | Postma-Haarsma et al, Plant Mol. Biol. 39: 257-71, 1999 |
| rice oleosin | Wu et al, J. Biochem. 123: 386, 1998 |
| sunflower oleosin | Cummins et al., Plant Mol. Biol. 19: 873-876, 1992 |
| PRO0117, putative rice 40S | WO 2004/070039 |
| ribosomal protein | |
| PRO0136, rice alanine | unpublished |
| aminotransferase | |
| PRO0147, trypsin inhibitor ITR1 | unpublished |
| (barley) | |
| PRO0151, rice WSI18 | WO 2004/070039 |
| PRO0175, rice RAB21 | WO 2004/070039 |
| PRO005 | WO 2004/070039 |
| PRO0095 | WO 2004/070039 |
| α-amylase (Amy32b) | Lanahan et al, Plant Cell 4: 203-211, 1992; Skriver et al, |
| | Proc Natl Acad Sci USA 88: 7266-7270, 1991 |
| cathepsin β-like gene | Cejudo et al, Plant Mol Biol 20: 849-856, 1992 |
| Barley Ltp2 | Kalla et al., Plant J. 6: 849-60, 1994 |
| Chi26 | Leah et al., Plant J. 4: 579-89, 1994 |
| Maize B-Peru | Selinger et al., Genetics 149; 1125-38, 1998 |

TABLE 2d
examples of endosperm-specific promoters

| Gene source | Reference |
|---|---|
| glutelin (rice) | Takaiwa et al. (1986) Mol Gen Genet 208: 15-22; Takaiwa et al. |
| | (1987) FEBS Letts. 221: 43-47 |
| zein | Matzke et al., (1990) Plant Mol Biol 14(3): 323-32 |
| wheat LMW and HMW | Colot et al. (1989) Mol Gen Genet 216: 81-90, Anderson et al. |
| glutenin-1 | (1989) NAR 17: 461-2 |
| wheat SPA | Albani et al. (1997) Plant Cell 9: 171-184 |
| wheat gliadins | Rafalski et al. (1984) EMBO 3: 1409-15 |
| barley Itr1 promoter | Diaz et al. (1995) Mol Gen Genet 248(5): 592-8 |
| barley B1, C, D, hordein | Cho et al. (1999) Theor Appl Genet 98: 1253-62; Muller et al. |
| | (1993) Plant J 4: 343-55; Sorenson et al. (1996) Mol Gen Genet |
| | 250: 750-60 |
| barley DOF | Mena et al, (1998) Plant J 116(1): 53-62 |
| blz2 | Onate et al. (1999) J Biol Chem 274(14): 9175-82 |
| synthetic promoter | Vicente-Carbajosa et al. (1998) Plant J 13: 629-640 |
| rice prolamin NRP33 | Wu et al, (1998) Plant Cell Physiol 39(8) 885-889 |
| rice globulin Glb-1 | Wu et al. (1998) Plant Cell Physiol 39(8) 885-889 |
| rice globulin REB/OHP-1 | Nakase et al. (1997) Plant Molec Biol 33: 513-522 |
| rice ADP-glucose | Russell et al. (1997) Trans Res 6: 157-68 |
| pyrophosphorylase | |
| maize ESR gene family | Opsahl-Ferstad et al. (1997) Plant J 12: 235-46 |
| sorghum kafirin | DeRose et al. (1996) Plant Mol Biol 32: 1029-35 |

TABLE 2e
Examples of embryo specific promoters:

| Gene source | Reference |
|---|---|
| rice OSH1 | Sato et al, Proc. Natl. Acad. Sci. USA, 93: 8117-8122, |
| | 1996 |
| KNOX | Postma-Haarsma et al, Plant Mol. Biol. 39: 257-71, 1999 |
| PRO0151 | WO 2004/070039 |
| PRO0175 | WO 2004/070039 |
| PRO005 | WO 2004/070039 |
| PRO0095 | WO 2004/070039 |

TABLE 2f
Examples of aleurone-specific promoters:

| Gene source | Reference |
|---|---|
| α-amylase (Amy32b) | Lanahan et al, Plant Cell 4: 203-211, |
| | 1992; Skriver et al, |
| | Proc Natl Acad Sci USA 88: 7266-7270, 1991 |
| cathepsin β-like gene | Cejudo et al, Plant Mol Biol 20: 849-856, 1992 |
| Barley Ltp2 | Kalla et al., Plant J. 6: 849-60, 1994 |
| Chi26 | Leah et al., Plant J. 4: 579-89, 1994 |
| Maize B-Peru | Selinger et al., Genetics 149; 1125-38, 1998 |

[0061] A green tissue-specific promoter as defined herein is a promoter that is transcriptionally active predominantly in green tissue, substantially to the exclusion of any other parts of a plant, whilst still allowing for any leaky expression in these other plant parts.

[0062] Examples of green tissue-specific promoters which may be used to perform the methods of the invention are shown in Table 2g below.

TABLE 2g
Examples of green tissue-specific promoters

| Gene | Expression | Reference |
|---|---|---|
| Maize Orthophosphate dikinase | Leaf specific | Fukavama et al., 2001 |
| Maize Phosphoenolpyruvate | Leaf specific | Kausch et al., 2001 |
| carboxylase | | |
| Rice Phosphoenolpyruvate | Leaf specific | Liu et al., 2003 |
| carboxylase | | |
| Rice small subunit Rubisco | Leaf specific | Nomura et al., 2000 |
| rice beta expansin EXBP9 | Shoot specific | WO 2004/070039 |
| Pigeonpea small subunit Rubisco | Leaf specific | Panguluri et al., 2005 |
| Pea RBCS3A | Leaf specific | |

[0063] Another example of a tissue-specific promoter is a meristem-specific promoter, which is transcriptionally active predominantly in meristematic tissue, substantially to the exclusion of any other parts of a plant, whilst still allowing for any leaky expression in these other plant parts.

### Terminator

[0064] The term “terminator” encompasses a control sequence which is a DNA sequence at the end of a transcriptional unit which signals 3′ processing and polyadenylation of a primary transcript and termination of transcription. The terminator can be derived from the natural gene, from a variety of other plant genes, or from T-DNA. The terminator to be added may be derived from, for example, the nopaline synthase or octopine synthase genes, or alternatively from another plant gene, or less preferably from any other eukaryotic gene.

### Modulation

[0065] The term “modulation” means in relation to expression or gene expression, a process in which the expression level is changed by said gene expression in comparison to the control plant, preferably the expression level is increased. The original, unmodulated expression may be of any kind of expression of a structural RNA (rRNA, tRNA) or mRNA with subsequent translation. The term “modulating the activity” shall mean any change of the expression of the inventive nucleic acid sequences or encoded proteins, which leads to increased yield and/or increased growth of the plants.

### Expression

[0066] The term “expression” or “gene expression” means the transcription of a specific gene or specific genes or specific genetic construct. The term “expression” or “gene expression” in particular means the transcription of a gene or genes or genetic construct into structural RNA (rRNA, tRNA) or mRNA with or without subsequent translation of the latter into a protein. The process includes transcription of DNA and processing of the resulting mRNA product.

### Increased Expression/Overexpression

[0067] The term “increased expression” or “overexpression” as used herein means any form of expression that is additional to the original wild-type expression level.

[0068] Methods for increasing expression of genes or gene products are well documented in the art and include, for example, overexpression driven by appropriate promoters, the use of transcription enhancers or translation enhancers. Isolated nucleic acids which serve as promoter or enhancer elements may be introduced in an appropriate position (typically upstream) of a non-heterologous form of a polynucleotide so as to upregulate expression of a nucleic acid encoding the polypeptide of interest. For example, endogenous promoters may be altered in vivo by mutation, deletion, and/or substitution (see, Kmiec, U.S. Pat. No. 5,565,350; Zarling et al., WO9322443), or isolated promoters may be introduced into a plant cell in the proper orientation and distance from a gene of the present invention so as to control the expression of the gene.

[0069] If polypeptide expression is desired, it is generally desirable to include a polyadenylation region at the 3′-end of a polynucleotide coding region. The polyadenylation region can be derived from the natural gene, from a variety of other plant genes, or from T-DNA. The 3′ end sequence to be added may be derived from, for example, the nopaline synthase or octopine synthase genes, or alternatively from another plant gene, or less preferably from any other eukaryotic gene.

[0070] An intron sequence may also be added to the 5′ untranslated region (UTR) or the coding sequence of the partial coding sequence to increase the amount of the mature message that accumulates in the cytosol. Inclusion of a spliceable intron in the transcription unit in both plant and animal expression constructs has been shown to increase gene expression at both the mRNA and protein levels up to 1000-fold (Buchman and Berg (1988) Mol. Cell. biol. 8: 4395-4405; Callis et al. (1987) Genes Dev 1:1183-1200). Such intron enhancement of gene expression is typically greatest when placed near the 5′ end of the transcription unit. Use of the maize introns Adh1-S intron 1, 2, and 6, the Bronze-1 intron are known in the art. For general information see: The Maize Handbook, Chapter 116, Freeling and Walbot, Eds., Springer, N.Y. (1994).

### Endogenous Gene

[0071] Reference herein to an “endogenous” gene not only refers to the gene in question as found in a plant in its natural form (i.e., without there being any human intervention), but also refers to that same gene (or a substantially homologous nucleic acid/gene) in an isolated form subsequently (re)introduced into a plant (a transgene). For example, a transgenic plant containing such a transgene may encounter a substantial reduction of the transgene expression and/or substantial reduction of expression of the endogenous gene. The isolated gene may be isolated from an organism or may be manmade, for example by chemical synthesis.

### Decreased Expression

[0072] Reference herein to “decreased expression” or “reduction or substantial elimination” of expression is taken to mean a decrease in endogenous gene expression and/or polypeptide levels and/or polypeptide activity relative to control plants. The reduction or substantial elimination is in increasing order of preference at least 10%, 20%, 30%, 40% or 50%, 60%, 70%, 80%, 85%, 90%, or 95%, 96%, 97%, 98%, 99% or more reduced compared to that of control plants.

[0073] For the reduction or substantial elimination of expression an endogenous gene in a plant, a sufficient length of substantially contiguous nucleotides of a nucleic acid sequence is required. In order to perform gene silencing, this may be as little as 20, 19, 18, 17, 16, 15, 14, 13, 12, 11, 10 or fewer nucleotides, alternatively this may be as much as the entire gene (including the 5′ and/or 3′ UTR, either in part or in whole). The stretch of substantially contiguous nucleotides may be derived from the nucleic acid encoding the protein of interest (target gene), or from any nucleic acid capable of encoding an orthologue, paralogue or homologue of the protein of interest. Preferably, the stretch of substantially contiguous nucleotides is capable of forming hydrogen bonds with the target gene (either sense or antisense strand), more preferably, the stretch of substantially contiguous nucleotides has, in increasing order of preference, 50%, 60%, 70%, 80%, 85%, 90%, 95%, 96%, 97%, 98%, 99%, 100% sequence identity to the target gene (either sense or antisense strand). A nucleic acid sequence encoding a (functional) polypeptide is not a requirement for the various methods discussed herein for the reduction or substantial elimination of expression of an endogenous gene.

[0074] This reduction or substantial elimination of expression may be achieved using routine tools and techniques. A preferred method for the reduction or substantial elimination of endogenous gene expression is by introducing and expressing in a plant a genetic construct into which the nucleic acid (in this case a stretch of substantially contiguous nucleotides derived from the gene of interest, or from any nucleic acid capable of encoding an orthologue, paralogue or homologue of any one of the protein of interest) is cloned as an inverted repeat (in part or completely), separated by a spacer (non-coding DNA).

[0075] In such a preferred method, expression of the endogenous gene is reduced or substantially eliminated through RNA-mediated silencing using an inverted repeat of a nucleic acid or a part thereof (in this case a stretch of substantially contiguous nucleotides derived from the gene of interest, or from any nucleic acid capable of encoding an orthologue, paralogue or homologue of the protein of interest), preferably capable of forming a hairpin structure. The inverted repeat is cloned in an expression vector comprising control sequences. A non-coding DNA nucleic acid sequence (a spacer, for example a matrix attachment region fragment (MAR), an intron, a polylinker, etc.) is located between the two inverted nucleic acids forming the inverted repeat. After transcription of the inverted repeat, a chimeric RNA with a self-complementary structure is formed (partial or complete). This double-stranded RNA structure is referred to as the hairpin RNA (hpRNA). The hpRNA is processed by the plant into siRNAs that are incorporated into an RNA-induced silencing complex (RISC). The RISC further cleaves the mRNA transcripts, thereby substantially reducing the number of mRNA transcripts to be translated into polypeptides. For further general details see for example, Grierson et al. (1998) WO 98/53083; Waterhouse et al. (1999) WO 99/53050).

[0076] Performance of the methods of the invention does not rely on introducing and expressing in a plant a genetic construct into which the nucleic acid is cloned as an inverted repeat, but any one or more of several well-known “gene silencing” methods may be used to achieve the same effects.

[0077] One such method for the reduction of endogenous gene expression is RNA-mediated silencing of gene expression (downregulation). Silencing in this case is triggered in a plant by a double stranded RNA sequence (dsRNA) that is substantially similar to the target endogenous gene. This dsRNA is further processed by the plant into about 20 to about 26 nucleotides called short interfering RNAs (siRNAs). The siRNAs are incorporated into an RNA-induced silencing complex (RISC) that cleaves the mRNA transcript of the endogenous target gene, thereby substantially reducing the number of mRNA transcripts to be translated into a polypeptide. Preferably, the double stranded RNA sequence corresponds to a target gene.

[0078] Another example of an RNA silencing method involves the introduction of nucleic acid sequences or parts thereof (in this case a stretch of substantially contiguous nucleotides derived from the gene of interest, or from any nucleic acid capable of encoding an orthologue, paralogue or homologue of the protein of interest) in a sense orientation into a plant. “Sense orientation” refers to a DNA sequence that is homologous to an mRNA transcript thereof. Introduced into a plant would therefore be at least one copy of the nucleic acid sequence. The additional nucleic acid sequence will reduce expression of the endogenous gene, giving rise to a phenomenon known as co-suppression. The reduction of gene expression will be more pronounced if several additional copies of a nucleic acid sequence are introduced into the plant, as there is a positive correlation between high transcript levels and the triggering of co-suppression.

[0079] Another example of an RNA silencing method involves the use of antisense nucleic acid sequences. An “antisense” nucleic acid sequence comprises a nucleotide sequence that is complementary to a “sense” nucleic acid sequence encoding a protein, i.e. complementary to the coding strand of a double-stranded cDNA molecule or complementary to an mRNA transcript sequence. The antisense nucleic acid sequence is preferably complementary to the endogenous gene to be silenced. The complementarity may be located in the “coding region” and/or in the “non-coding region” of a gene. The term “coding region” refers to a region of the nucleotide sequence comprising codons that are translated into amino acid residues. The term “non-coding region” refers to 5′ and 3′ sequences that flank the coding region that are transcribed but not translated into amino acids (also referred to as 5′ and 3′ untranslated regions).

[0080] Antisense nucleic acid sequences can be designed according to the rules of Watson and Crick base pairing. The antisense nucleic acid sequence may be complementary to the entire nucleic acid sequence (in this case a stretch of substantially contiguous nucleotides derived from the gene of interest, or from any nucleic acid capable of encoding an orthologue, paralogue or homologue of the protein of interest), but may also be an oligonucleotide that is antisense to only a part of the nucleic acid sequence (including the mRNA 5′ and 3′ UTR). For example, the antisense oligonucleotide sequence may be complementary to the region surrounding the translation start site of an mRNA transcript encoding a polypeptide. The length of a suitable antisense oligonucleotide sequence is known in the art and may start from about 50, 45, 40, 35, 30, 25, 20, 15 or 10 nucleotides in length or less. An antisense nucleic acid sequence according to the invention may be constructed using chemical synthesis and enzymatic ligation reactions using methods known in the art. For example, an antisense nucleic acid sequence (e.g., an antisense oligonucleotide sequence) may be chemically synthesized using naturally occurring nucleotides or variously modified nucleotides designed to increase the biological stability of the molecules or to increase the physical stability of the duplex formed between the antisense and sense nucleic acid sequences, e.g., phosphorothioate derivatives and acridine substituted nucleotides may be used. Examples of modified nucleotides that may be used to generate the antisense nucleic acid sequences are well known in the art. Known nucleotide modifications include methylation, cyclization and ‘caps’ and substitution of one or more of the naturally occurring nucleotides with an analogue such as inosine. Other modifications of nucleotides are well known in the art.

[0081] The antisense nucleic acid sequence can be produced biologically using an expression vector into which a nucleic acid sequence has been subcloned in an antisense orientation (i.e., RNA transcribed from the inserted nucleic acid will be of an antisense orientation to a target nucleic acid of interest). Preferably, production of antisense nucleic acid sequences in plants occurs by means of a stably integrated nucleic acid construct comprising a promoter, an operably linked antisense oligonucleotide, and a terminator.

[0082] The nucleic acid molecules used for silencing in the methods of the invention (whether introduced into a plant or generated in situ) hybridize with or bind to mRNA transcripts and/or genomic DNA encoding a polypeptide to thereby inhibit expression of the protein, e.g., by inhibiting transcription and/or translation. The hybridization can be by conventional nucleotide complementarity to form a stable duplex, or, for example, in the case of an antisense nucleic acid sequence which binds to DNA duplexes, through specific interactions in the major groove of the double helix. Antisense nucleic acid sequences may be introduced into a plant by transformation or direct injection at a specific tissue site. Alternatively, antisense nucleic acid sequences can be modified to target selected cells and then administered systemically. For example, for systemic administration, antisense nucleic acid sequences can be modified such that they specifically bind to receptors or antigens expressed on a selected cell surface, e.g., by linking the antisense nucleic acid sequence to peptides or antibodies which bind to cell surface receptors or antigens. The antisense nucleic acid sequences can also be delivered to cells using the vectors described herein.

[0083] According to a further aspect, the antisense nucleic acid sequence is an a-anomeric nucleic acid sequence. An a-anomeric nucleic acid sequence forms specific double-stranded hybrids with complementary RNA in which, contrary to the usual b-units, the strands run parallel to each other (Gaultier et al. (1987) Nucl Ac Res 15: 6625-6641). The antisense nucleic acid sequence may also comprise a 2′-o-methylribonucleotide (Inoue et al. (1987) Nucl Ac Res 15, 6131-6148) or a chimeric RNA-DNA analogue (Inoue et al. (1987) FEBS Lett. 215, 327-330).

[0084] The reduction or substantial elimination of endogenous gene expression may also be performed using ribozymes. Ribozymes are catalytic RNA molecules with ribonuclease activity that are capable of cleaving a single-stranded nucleic acid sequence, such as an mRNA, to which they have a complementary region. Thus, ribozymes (e.g., hammerhead ribozymes (described in Haselhoff and Gerlach (1988) Nature 334, 585-591) can be used to catalytically cleave mRNA transcripts encoding a polypeptide, thereby substantially reducing the number of mRNA transcripts to be translated into a polypeptide. A ribozyme having specificity for a nucleic acid sequence can be designed (see for example: Cech et al. U.S. Pat. No. 4,987,071; and Cech et al. U.S. Pat. No. 5,116,742). Alternatively, mRNA transcripts corresponding to a nucleic acid sequence can be used to select a catalytic RNA having a specific ribonuclease activity from a pool of RNA molecules (Bartel and Szostak (1993) Science 261, 1411-1418). The use of ribozymes for gene silencing in plants is known in the art (e.g., Atkins et al. (1994) WO 94/00012; Lenne et al. (1995) WO 95/03404; Lutziger et al. (2000) WO 00/00619; Prinsen et al. (1997) WO 97/13865 and Scott et al. (1997) WO 97/38116).

[0085] Gene silencing may also be achieved by insertion mutagenesis (for example, T-DNA insertion or transposon insertion) or by strategies as described by, among others, Angell and Baulcombe ((1999) Plant J 20(3): 357-62), (Amplicon VIGS WO 98/36083), or Baulcombe (WO 99/15682).

[0086] Gene silencing may also occur if there is a mutation on an endogenous gene and/or a mutation on an isolated gene/nucleic acid subsequently introduced into a plant. The reduction or substantial elimination may be caused by a non-functional polypeptide. For example, a polypeptide may bind to various interacting proteins; one or more mutation(s) and/or truncation(s) may therefore provide for a polypeptide that is still able to bind interacting proteins (such as receptor proteins) but that cannot exhibit its normal function (such as signalling ligand).

[0087] A further approach to gene silencing is by targeting nucleic acid sequences complementary to the regulatory region of the gene (e.g., the promoter and/or enhancers) to form triple helical structures that prevent transcription of the gene in target cells. See Helene, C., Anticancer Drug Res. 6, 569-84, 1991; Helene et al., Ann. N.Y. Acad. Sci. 660, 27-36 1992; and Maher, L. J. Bioassays 14, 807-15, 1992.

[0088] Other methods, such as the use of antibodies directed to an endogenous polypeptide for inhibiting its function in planta, or interference in the signalling pathway in which a polypeptide is involved, will be well known to the skilled man. In particular, it can be envisaged that manmade molecules may be useful for inhibiting the biological function of a target polypeptide, or for interfering with the signalling pathway in which the target polypeptide is involved.

[0089] Alternatively, a screening program may be set up to identify in a plant population natural variants of a gene, which variants encode polypeptides with reduced activity. Such natural variants may also be used for example, to perform homologous recombination.

[0090] Artificial and/or natural microRNAs (miRNAs) may be used to knock out gene expression and/or mRNA translation. Endogenous miRNAs are single stranded small RNAs of typically 19-24 nucleotides long. They function primarily to regulate gene expression and/or mRNA translation. Most plant microRNAs (miRNAs) have perfect or near-perfect complementarity with their target sequences. However, there are natural targets with up to five mismatches. They are processed from longer non-coding RNAs with characteristic fold-back structures by double-strand specific RNases of the Dicer family. Upon processing, they are incorporated in the RNA-induced silencing complex (RISC) by binding to its main component, an Argonaute protein. mRNAs serve as the specificity components of RISC, since they base-pair to target nucleic acids, mostly mRNAs, in the cytoplasm. Subsequent regulatory events include target mRNA cleavage and destruction and/or translational inhibition. Effects of miRNA overexpression are thus often reflected in decreased mRNA levels of target genes.

[0091] Artificial microRNAs (amiRNAs), which are typically 21 nucleotides in length, can be genetically engineered specifically to negatively regulate gene expression of single or multiple genes of interest. Determinants of plant microRNA target selection are well known in the art. Empirical parameters for target recognition have been defined and can be used to aid in the design of specific amiRNAs, (Schwab et al., Dev. Cell 8, 517-527, 2005). Convenient tools for design and generation of amiRNAs and their precursors are also available to the public (Schwab et al., Plant Cell 18, 1121-1133, 2006).

[0092] For optimal performance, the gene silencing techniques used for reducing expression in a plant of an endogenous gene requires the use of nucleic acid sequences from monocotyledonous plants for transformation of monocotyledonous plants, and from dicotyledonous plants for transformation of dicotyledonous plants. Preferably, a nucleic acid sequence from any given plant species is introduced into that same species. For example, a nucleic acid sequence from rice is transformed into a rice plant. However, it is not an absolute requirement that the nucleic acid sequence to be introduced originates from the same plant species as the plant in which it will be introduced. It is sufficient that there is substantial homology between the endogenous target gene and the nucleic acid to be introduced.

[0093] Described above are examples of various methods for the reduction or substantial elimination of expression in a plant of an endogenous gene. A person skilled in the art would readily be able to adapt the aforementioned methods for silencing so as to achieve reduction of expression of an endogenous gene in a whole plant or in parts thereof through the use of an appropriate promoter, for example.

### Selectable Marker (Gene)/Reporter Gene

[0094] “Selectable marker”, “selectable marker gene” or “reporter gene” includes any gene that confers a phenotype on a cell in which it is expressed to facilitate the identification and/or selection of cells that are transfected or transformed with a nucleic acid construct of the invention. These marker genes enable the identification of a successful transfer of the nucleic acid molecules via a series of different principles. Suitable markers may be selected from markers that confer antibiotic or herbicide resistance, that introduce a new metabolic trait or that allow visual selection. Examples of selectable marker genes include genes conferring resistance to antibiotics (such as nptII that phosphorylates neomycin and kanamycin, or hpt, phosphorylating hygromycin, or genes conferring resistance to, for example, bleomycin, streptomycin, tetracyclin, chloramphenicol, ampicillin, gentamycin, geneticin (G418), spectinomycin or blasticidin), to herbicides (for example bar which provides resistance to Basta®; aroA or gox providing resistance against glyphosate, or the genes conferring resistance to, for example, imidazolinone, phosphinothricin or sulfonylurea), or genes that provide a metabolic trait (such as manA that allows plants to use mannose as sole carbon source or xylose isomerase for the utilisation of xylose, or antinutritive markers such as the resistance to 2-deoxyglucose). Expression of visual marker genes results in the formation of colour (for example β-glucuronidase, GUS or β-galactosidase with its coloured substrates, for example X-Gal), luminescence (such as the luciferin/luciferase system) or fluorescence (Green Fluorescent Protein, GFP, and derivatives thereof). This list represents only a small number of possible markers. The skilled worker is familiar with such markers. Different markers are preferred, depending on the organism and the selection method.

[0095] It is known that upon stable or transient integration of nucleic acids into plant cells, only a minority of the cells takes up the foreign DNA and, if desired, integrates it into its genome, depending on the expression vector used and the transfection technique used. To identify and select these integrants, a gene coding for a selectable marker (such as the ones described above) is usually introduced into the host cells together with the gene of interest. These markers can for example be used in mutants in which these genes are not functional by, for example, deletion by conventional methods. Furthermore, nucleic acid molecules encoding a selectable marker can be introduced into a host cell on the same vector that comprises the sequence encoding the polypeptides of the invention or used in the methods of the invention, or else in a separate vector. Cells which have been stably transfected with the introduced nucleic acid can be identified for example by selection (for example, cells which have integrated the selectable marker survive whereas the other cells die).

[0096] Since the marker genes, particularly genes for resistance to antibiotics and herbicides, are no longer required or are undesired in the transgenic host cell once the nucleic acids have been introduced successfully, the process according to the invention for introducing the nucleic acids advantageously employs techniques which enable the removal or excision of these marker genes. One such a method is what is known as co-transformation. The co-transformation method employs two vectors simultaneously for the transformation, one vector bearing the nucleic acid according to the invention and a second bearing the marker gene(s). A large proportion of transformants receives or, in the case of plants, comprises (up to 40% or more of the transformants), both vectors. In case of transformation with Agrobacteria, the transformants usually receive only a part of the vector, i.e. the sequence flanked by the T-DNA, which usually represents the expression cassette. The marker genes can subsequently be removed from the transformed plant by performing crosses. In another method, marker genes integrated into a transposon are used for the transformation together with desired nucleic acid (known as the Ac/Ds technology). The transformants can be crossed with a transposase source or the transformants are transformed with a nucleic acid construct conferring expression of a transposase, transiently or stable. In some cases (approx. 10%), the transposon jumps out of the genome of the host cell once transformation has taken place successfully and is lost. In a further number of cases, the transposon jumps to a different location. In these cases the marker gene must be eliminated by performing crosses. In microbiology, techniques were developed which make possible, or facilitate, the detection of such events. A further advantageous method relies on what is known as recombination systems; whose advantage is that elimination by crossing can be dispensed with. The best-known system of this type is what is known as the Cre/lox system. Cre1 is a recombinase that removes the sequences located between the loxP sequences. If the marker gene is integrated between the loxP sequences, it is removed once transformation has taken place successfully, by expression of the recombinase. Further recombination systems are the HIN/HIX, FLP/FRT and REP/STB system (Tribble et al., J. Biol. Chem., 275, 2000: 22255-22267; Velmurugan et al., J. Cell Biol., 149, 2000: 553-566). A site-specific integration into the plant genome of the nucleic acid sequences according to the invention is possible. Naturally, these methods can also be applied to microorganisms such as yeast, fungi or bacteria.

### Transgenic/Transgene/Recombinant

[0097] For the purposes of the invention, “transgenic”, “transgene” or “recombinant” means with regard to, for example, a nucleic acid sequence, an expression cassette, gene construct or a vector comprising the nucleic acid sequence or an organism transformed with the nucleic acid sequences, expression cassettes or vectors according to the invention, all those constructions brought about by recombinant methods in which either
[0098] (a) the nucleic acid sequences encoding proteins useful in the methods of the invention, or
[0099] (b) genetic control sequence(s) which is operably linked with the nucleic acid sequence according to the invention, for example a promoter, or
[0100] (c) a) and b)
   are not located in their natural genetic environment or have been modified by recombinant methods, it being possible for the modification to take the form of, for example, a substitution, addition, deletion, inversion or insertion of one or more nucleotide residues. The natural genetic environment is understood as meaning the natural genomic or chromosomal locus in the original plant or the presence in a genomic library. In the case of a genomic library, the natural genetic environment of the nucleic acid sequence is preferably retained, at least in part. The environment flanks the nucleic acid sequence at least on one side and has a sequence length of at least 50 bp, preferably at least 500 bp, especially preferably at least 1000 bp, most preferably at least 5000 bp. A naturally occurring expression cassette—for example the naturally occurring combination of the natural promoter of the nucleic acid sequences with the corresponding nucleic acid sequence encoding a polypeptide useful in the methods of the present invention, as defined above—becomes a transgenic expression cassette when this expression cassette is modified by non-natural, synthetic (“artificial”) methods such as, for example, mutagenic treatment. Suitable methods are described, for example, in U.S. Pat. No. 5,565,350 or WO 00/15815.

[0101] A transgenic plant for the purposes of the invention is thus understood as meaning, as above, that the nucleic acids used in the method of the invention are not at their natural locus in the genome of said plant, it being possible for the nucleic acids to be expressed homologously or heterologously. However, as mentioned, transgenic also means that, while the nucleic acids according to the invention or used in the inventive method are at their natural position in the genome of a plant, the sequence has been modified with regard to the natural sequence, and/or that the regulatory sequences of the natural sequences have been modified. Transgenic is preferably understood as meaning the expression of the nucleic acids according to the invention at an unnatural locus in the genome, i.e. homologous or, preferably, heterologous expression of the nucleic acids takes place. Preferred transgenic plants are mentioned herein.

### Transformation

[0102] The term “introduction” or “transformation” as referred to herein encompasses the transfer of an exogenous polynucleotide into a host cell, irrespective of the method used for transfer. Plant tissue capable of subsequent clonal propagation, whether by organogenesis or embryogenesis, may be transformed with a genetic construct of the present invention and a whole plant regenerated there from. The particular tissue chosen will vary depending on the clonal propagation systems available for, and best suited to, the particular species being transformed. Exemplary tissue targets include leaf disks, pollen, embryos, cotyledons, hypocotyls, megagametophytes, callus tissue, existing meristematic tissue (e.g., apical meristem, axillary buds, and root meristems), and induced meristem tissue (e.g., cotyledon meristem and hypocotyl meristem). The polynucleotide may be transiently or stably introduced into a host cell and may be maintained non-integrated, for example, as a plasmid. Alternatively, it may be integrated into the host genome. The resulting transformed plant cell may then be used to regenerate a transformed plant in a manner known to persons skilled in the art.

[0103] The transfer of foreign genes into the genome of a plant is called transformation. Transformation of plant species is now a fairly routine technique. Advantageously, any of several transformation methods may be used to introduce the gene of interest into a suitable ancestor cell. The methods described for the transformation and regeneration of plants from plant tissues or plant cells may be utilized for transient or for stable transformation. Transformation methods include the use of liposomes, electroporation, chemicals that increase free DNA uptake, injection of the DNA directly into the plant, particle gun bombardment, transformation using viruses or pollen and microprojection. Methods may be selected from the calcium/polyethylene glycol method for protoplasts (Krens, F. A. et al., (1982) Nature 296, 72-74; Negrutiu I et al. (1987) Plant Mol Biol 8: 363-373); electroporation of protoplasts (Shillito R. D. et al. (1985) Bio/Technol 3, 1099-1102); microinjection into plant material (Crossway A et al., (1986) Mol. Gen. Genet. 202: 179-185); DNA or RNA-coated particle bombardment (Klein T M et al., (1987) Nature 327: 70) infection with (non-integrative) viruses and the like. Transgenic plants, including transgenic crop plants, are preferably produced via Agrobacterium-mediated transformation. An advantageous transformation method is the transformation in planta. To this end, it is possible, for example, to allow the agrobacteria to act on plant seeds or to inoculate the plant meristem with agrobacteria. It has proved particularly expedient in accordance with the invention to allow a suspension of transformed agrobacteria to act on the intact plant or at least on the flower primordia. The plant is subsequently grown on until the seeds of the treated plant are obtained (Clough and Bent, Plant J. (1998) 16, 735-743). Methods for Agrobacterium-mediated transformation of rice include well known methods for rice transformation, such as those described in any of the following: European patent application EP 1198985 A1, Aldemita and Hodges (Planta 199: 612-617, 1996); Chan et al. (Plant Mol Biol 22 (3): 491-506, 1993), Hiei et al. (Plant J 6 (2): 271-282, 1994), which disclosures are incorporated by reference herein as if fully set forth. In the case of corn transformation, the preferred method is as described in either Ishida et al. (Nat. Biotechnol 14(6): 745-50, 1996) or Frame et al. (Plant Physiol 129(1): 13-22, 2002), which disclosures are incorporated by reference herein as if fully set forth. Said methods are further described by way of example in B. Jenes et al., Techniques for Gene Transfer, in: Transgenic Plants, Vol. 1, Engineering and Utilization, eds. S. D. Kung and R. Wu, Academic Press (1993) 128-143 and in Potrykus Annu. Rev. Plant Physiol. Plant Molec. Biol. 42 (1991) 205-225). The nucleic acids or the construct to be expressed is preferably cloned into a vector, which is suitable for transforming Agrobacterium tumefaciens, for example pBin19 (Bevan et al., Nucl. Acids Res. 12 (1984) 8711). Agrobacteria transformed by such a vector can then be used in known manner for the transformation of plants, such as plants used as a model, like Arabidopsis (Arabidopsis thaliana is within the scope of the present invention not considered as a crop plant), or crop plants such as, by way of example, tobacco plants, for example by immersing bruised leaves or chopped leaves in an agrobacterial solution and then culturing them in suitable media. The transformation of plants by means of Agrobacterium tumefaciens is described, for example, by Höfgen and Willmitzer in Nucl. Acid Res. (1988) 16, 9877 or is known inter alia from F. F. White, Vectors for Gene Transfer in Higher Plants; in Transgenic Plants, Vol. 1, Engineering and Utilization, eds. S. D. Kung and R. Wu, Academic Press, 1993, pp. 15-38.

[0104] In addition to the transformation of somatic cells, which then have to be regenerated into intact plants, it is also possible to transform the cells of plant meristems and in particular those cells which develop into gametes. In this case, the transformed gametes follow the natural plant development, giving rise to transgenic plants. Thus, for example, seeds of Arabidopsis are treated with agrobacteria and seeds are obtained from the developing plants of which a certain proportion is transformed and thus transgenic [Feldman, K A and Marks M D (1987). Mol Gen Genet. 208:274-289; Feldmann K (1992). In: C Koncz, N-H Chua and J Shell, eds, Methods in Arabidopsis Research. Word Scientific, Singapore, pp. 274-289]. Alternative methods are based on the repeated removal of the inflorescences and incubation of the excision site in the center of the rosette with transformed agrobacteria, whereby transformed seeds can likewise be obtained at a later point in time (Chang (1994). Plant J. 5: 551-558; Katavic (1994). Mol Gen Genet, 245: 363-370). However, an especially effective method is the vacuum infiltration method with its modifications such as the “floral dip” method. In the case of vacuum infiltration of Arabidopsis, intact plants under reduced pressure are treated with an agrobacterial suspension [Bechthold, N (1993). C R Acad Sci Paris Life Sci, 316: 1194-1199], while in the case of the “floral dip” method the developing floral tissue is incubated briefly with a surfactant-treated agrobacterial suspension [Clough, S J and Bent A F (1998) The Plant J. 16, 735-743]. A certain proportion of transgenic seeds are harvested in both cases, and these seeds can be distinguished from non-transgenic seeds by growing under the above-described selective conditions. In addition the stable transformation of plastids is of advantages because plastids are inherited maternally is most crops reducing or eliminating the risk of transgene flow through pollen. The transformation of the chloroplast genome is generally achieved by a process which has been schematically displayed in Klaus et al., 2004 [Nature Biotechnology 22 (2), 225-229]. Briefly the sequences to be transformed are cloned together with a selectable marker gene between flanking sequences homologous to the chloroplast genome. These homologous flanking sequences direct site specific integration into the plastome. Plastidal transformation has been described for many different plant species and an overview is given in Bock (2001) Transgenic plastids in basic research and plant biotechnology. J Mol. Biol. 2001 Sep. 21; 312 (3):425-38 or Maliga, P (2003) Progress towards commercialization of plastid transformation technology. Trends Biotechnol. 21, 20-28. Further biotechnological progress has recently been reported in form of marker free plastid transformants, which can be produced by a transient co-integrated maker gene (Klaus et al., 2004, Nature Biotechnology 22(2), 225-229).

### T-DNA Activation Tagging

[0105] T-DNA activation tagging (Hayashi et al. Science (1992) 1350-1353), involves insertion of T-DNA, usually containing a promoter (may also be a translation enhancer or an intron), in the genomic region of the gene of interest or 10 kb up- or downstream of the coding region of a gene in a configuration such that the promoter directs expression of the targeted gene. Typically, regulation of expression of the targeted gene by its natural promoter is disrupted and the gene falls under the control of the newly introduced promoter. The promoter is typically embedded in a T-DNA. This T-DNA is randomly inserted into the plant genome, for example, through Agrobacterium infection and leads to modified expression of genes near the inserted T-DNA. The resulting transgenic plants show dominant phenotypes due to modified expression of genes close to the introduced promoter.

### TILLING

[0106] The term “TILLING” is an abbreviation of “Targeted Induced Local Lesions In Genomes” and refers to a mutagenesis technology useful to generate and/or identify nucleic acids encoding proteins with modified expression and/or activity. TILLING also allows selection of plants carrying such mutant variants. These mutant variants may exhibit modified expression, either in strength or in location or in timing (if the mutations affect the promoter for example). These mutant variants may exhibit higher activity than that exhibited by the gene in its natural form. TILLING combines high-density mutagenesis with high-throughput screening methods. The steps typically followed in TILLING are: (a) EMS mutagenesis (Redei G P and Koncz C (1992) In Methods in Arabidopsis Research, Koncz C, Chua N H, Schell J, eds. Singapore, World Scientific Publishing Co, pp. 16-82; Feldmann et al., (1994) In Meyerowitz E M, Somerville C R, eds, Arabidopsis. Cold Spring Harbor Laboratory Press, Cold Spring Harbor, N.Y., pp 137-172; Lightner J and Caspar T (1998) In J Martinez-Zapater, J Salinas, eds, Methods on Molecular Biology, Vol. 82. Humana Press, Totowa, N.J., pp 91-104); (b) DNA preparation and pooling of individuals; (c) PCR amplification of a region of interest; (d) denaturation and annealing to allow formation of heteroduplexes; (e) DHPLC, where the presence of a heteroduplex in a pool is detected as an extra peak in the chromatogram; (f) identification of the mutant individual; and (g) sequencing of the mutant PCR product. Methods for TILLING are well known in the art (McCallum et al., (2000) Nat Biotechnol 18: 455-457; reviewed by Stemple (2004) Nat Rev Genet. 5(2): 145-50).

### Homologous Recombination

[0107] Homologous recombination allows introduction in a genome of a selected nucleic acid at a defined selected position. Homologous recombination is a standard technology used routinely in biological sciences for lower organisms such as yeast or the moss Physcomitrella. Methods for performing homologous recombination in plants have been described not only for model plants (Offringa et al. (1990) EMBO J. 9(10): 3077-84) but also for crop plants, for example rice (Terada et al. (2002) Nat Biotech 20(10): 1030-4; Iida and Terada (2004) Curr Opin Biotech 15(2): 132-8).

### Yield

[0108] The term “yield” in general means a measurable produce of economic value, typically related to a specified crop, to an area, and to a period of time. Individual plant parts directly contribute to yield based on their number, size and/or weight, or the actual yield is the yield per acre for a crop and year, which is determined by dividing total production (includes both harvested and appraised production) by planted acres. The term “yield” of a plant may relate to vegetative biomass (root and/or shoot biomass), to reproductive organs, and/or to propagules (such as seeds) of that plant.

### Early Vigour

[0109] “Early vigour” refers to active healthy well-balanced growth especially during early stages of plant growth, and may result from increased plant fitness due to, for example, the plants being better adapted to their environment (i.e. optimizing the use of energy resources and partitioning between shoot and root). Plants having early vigour also show increased seedling survival and a better establishment of the crop, which often results in highly uniform fields (with the crop growing in uniform manner, i.e. with the majority of plants reaching the various stages of development at substantially the same time), and often better and higher yield. Therefore, early vigour may be determined by measuring various factors, such as thousand kernel weight, percentage germination, percentage emergence, seedling growth, seedling height, root length, root and shoot biomass and many more.

### Increase/Improve/Enhance

[0110] The terms “increase”, “improve” or “enhance” are interchangeable and shall mean in the sense of the application at least a 3%, 4%, 5%, 6%, 7%, 8%, 9% or 10%, preferably at least 15% or 20%, more preferably 25%, 30%, 35% or 40% more yield and/or growth in comparison to control plants as defined herein.

### Seed Yield

[0111] Increased seed yield may manifest itself as one or more of the following: a) an increase in seed biomass (total seed weight) which may be on an individual seed basis and/or per plant and/or per hectare or acre; b) increased number of flowers per plant; c) increased number of (filled) seeds; d) increased seed filling rate (which is expressed as the ratio between the number of filled seeds divided by the total number of seeds); e) increased harvest index, which is expressed as a ratio of the yield of harvestable parts, such as seeds, divided by the total biomass; and f) increased thousand kernel weight (TKW), which is extrapolated from the number of filled seeds counted and their total weight. An increased TKW may result from an increased seed size and/or seed weight, and may also result from an increase in embryo and/or endosperm size.

[0112] An increase in seed yield may also be manifested as an increase in seed size and/or seed volume. Furthermore, an increase in seed yield may also manifest itself as an increase in seed area and/or seed length and/or seed width and/or seed perimeter. Increased yield may also result in modified architecture, or may occur because of modified architecture.

### Greenness Index

[0113] The “greenness index” as used herein is calculated from digital images of plants. For each pixel belonging to the plant object on the image, the ratio of the green value versus the red value (in the RGB model for encoding color) is calculated. The greenness index is expressed as the percentage of pixels for which the green-to-red ratio exceeds a given threshold. Under normal growth conditions, under salt stress growth conditions, and under reduced nutrient availability growth conditions, the greenness index of plants is measured in the last imaging before flowering. In contrast, under drought stress growth conditions, the greenness index of plants is measured in the first imaging after drought.

### Plant

[0114] The term “plant” as used herein encompasses whole plants, ancestors and progeny of the plants and plant parts, including seeds, shoots, stems, leaves, roots (including tubers), flowers, and tissues and organs, wherein each of the aforementioned comprise the gene/nucleic acid of interest. The term “plant” also encompasses plant cells, suspension cultures, callus tissue, embryos, meristematic regions, gametophytes, sporophytes, pollen and microspores, again wherein each of the aforementioned comprises the gene/nucleic acid of interest.

[0115] Plants that are particularly useful in the methods of the invention include all plants which belong to the superfamily Viridiplantae, in particular monocotyledonous and dicotyledonous plants including fodder or forage legumes, ornamental plants, food crops, trees or shrubs selected from the list comprising Acer spp., Actinidia spp., Abelmoschus spp., Agave sisalana, Agropyron spp., Agrostis stolonifera, Allium spp., Amaranthus spp., Ammophila arenaria, Ananas comosus, Annona spp., Apium graveolens, Arachis spp, Artocarpus spp., Asparagus officinalis, Avena spp. (e.g. Avena sativa, Avena fatua, Avena byzantina, Avena fatua var. sativa, Avena hybrida), Averrhoa carambola, Bambusa sp., Benincasa hispida, Bertholletia excelsea, Beta vulgaris, Brassica spp. (e.g. Brassica napus, Brassica rapa ssp. [canola, oilseed rape, turnip rape]), Cadaba farinosa, Camellia sinensis, Canna indica, Cannabis sativa, Capsicum spp., Carex elata, Carica papaya, Carissa macrocarpa, Carya spp., Carthamus tinctorius, Castanea spp., Ceiba pentandra, Cichorium endivia, Cinnamomum spp., Citrullus lanatus, Citrus spp., Cocos spp., Coffea spp., Colocasia esculenta, Cola spp., Corchorus sp., Coriandrum sativum, Corylus spp., Crataegus spp., Crocus sativus, Cucurbita spp., Cucumis spp., Cynara spp., Daucus carota, Desmodium spp., Dimocarpus longan, Dioscorea spp., Diospyros spp., Echinochloa spp., Elaeis (e.g. Elaeis guineensis, Elaeis oleifera), Eleusine coracana, Erianthus sp., Eriobotrya japonica, Eucalyptus sp., Eugenia uniflora, Fagopyrum spp., Fagus spp., Festuca arundinacea, Ficus carica, Fortunella spp., Fragaria spp., Ginkgo biloba, Glycine spp. (e.g. Glycine max, Soja hispida or Soja max), Gossypium hirsutum, Helianthus spp. (e.g. Helianthus annuus), Hemerocallis fulva, Hibiscus spp., Hordeum spp. (e.g. Hordeum vulgare), Ipomoea batatas, Juglans spp., Lactuca sativa, Lathyrus spp., Lens culinaris, Linum usitatissimum, Litchi chinensis, Lotus spp., Luffa acutangula, Lupinus spp., Luzula sylvatica, Lycopersicon spp. (e.g. Lycopersicon esculentum, Lycopersicon lycopersicum, Lycopersicon pyriforme), Macrotyloma spp., Malus spp., Malpighia emarginata, Mammea americana, Mangifera indica, Manihot spp., Manilkara zapota, Medicago sativa, Melilotus spp., Mentha spp., Miscanthus sinensis, Momordica spp., Morus nigra, Musa spp., Nicotiana spp., Olea spp., Opuntia spp., Ornithopus spp., Oryza spp. (e.g. Oryza sativa, Oryza latifolia), Panicum miliaceum, Panicum virgatum, Passiflora edulis, Pastinaca sativa, Pennisetum sp., Persea spp., Petroselinum crispum, Phalaris arundinacea, Phaseolus spp., Phleum pratense, Phoenix spp., Phragmites australis, Physalis spp., Pinus spp., Pistacia vera, Pisum spp., Poa spp., Populus spp., Prosopis spp., Prunus spp., Psidium spp., Punica granatum, Pyrus communis, Quercus spp., Raphanus sativus, Rheum rhabarbarum, Ribes spp., Ricinus communis, Rubus spp., Saccharum spp., Salix sp., Sambucus spp., Secale cereale, Sesamum spp., Sinapis sp., Solanum spp. (e.g. Solanum tuberosum, Solanum integrifolium or Solanum lycopersicum), Sorghum bicolor, Spinacia spp., Syzygium spp., Tagetes spp., Tamarindus indica, Theobroma cacao, Trifolium spp., Triticosecale rimpaui, Triticum spp. (e.g. Triticum aestivum, Triticum durum, Triticum turgidum, Triticum hybernum, Triticum macha, Triticum sativum or Triticum vulgare), Tropaeolum minus, Tropaeolum majus, Vaccinium spp., Vicia spp., Vigna spp., Viola odorata, Vitis spp., Zea mays, Zizania palustris, Ziziphus spp., amongst others.

### DETAILED DESCRIPTION OF THE INVENTION

[0116] Surprisingly, it has now been found that modulating expression in a plant of a nucleic acid encoding a yield increasing polypeptide selected from the group consisting of:

phosphoenolpyruvate carboxylase (PEPC),
Class III U-Box protein and
PQQC protein
gives plants having enhanced yield-related traits relative to control plants. According to a first embodiment, the present invention provides a method for enhancing yield-related traits in plants relative to control plants, comprising modulating expression in a plant of a nucleic acid encoding a PEPC protein.

[0117] In one embodiment the method for modulating (preferably, increasing) expression of a nucleic acid encoding a PEPC protein is by introducing and expressing in a plant a nucleic acid encoding a PEPC protein.

[0118] In one embodiment the method for modulating (preferably, increasing) expression of a nucleic acid encoding a Class III U-Box protein is by introducing and expressing in a plant a nucleic acid encoding a Class III U-Box protein.

[0119] In one embodiment the method for modulating (preferably, increasing) expression of a nucleic acid encoding a PQQC protein is by introducing and expressing in a plant a nucleic acid encoding a PQQC protein.

[0120] In one embodiment any reference hereinafter to a “protein useful in the methods of the invention” is taken to mean a PEPC protein as defined herein. Any reference hereinafter to a “nucleic acid useful in the methods of the invention” is taken to mean a nucleic acid capable of encoding such a PEPC protein. The nucleic acid to be introduced into a plant (and therefore useful in performing the methods of the invention) is any nucleic acid encoding the type of protein which will now be described, hereafter also named “PEPC nucleic acid” or “PEPC gene”.

[0121] In one embodiment any reference hereinafter to a “protein useful in the methods of the invention” is taken to mean a Class III U-Box protein as defined herein. Any reference hereinafter to a “nucleic acid useful in the methods of the invention” is taken to mean a nucleic acid capable of encoding such a Class III U-Box protein. The nucleic acid to be introduced into a plant (and therefore useful in performing the methods of the invention) is any nucleic acid encoding the type of protein which will now be described, hereinafter also named “Class III U-Box nucleic acid” or “Class III U-Box gene”.

[0122] In one embodiment any reference hereinafter to a “protein useful in the methods of the invention” is taken to mean a PQQC protein as defined herein. Any reference hereinafter to a “nucleic acid useful in the methods of the invention” is taken to mean a nucleic acid capable of encoding such a PQQC protein. The nucleic acid to be introduced into a plant (and therefore useful in performing the methods of the invention) is any nucleic acid encoding the type of protein which will now be described, hereafter also named “PQQC nucleic acid” or “PQQC gene”.

[0123] A “PEPC polypeptide” as defined herein refers to the PEPC polypeptide represented by SEQ ID NO: 2 and to orthologues and paralogues thereof. Orthologues and paralogues of SEQ ID NO: 2 are identifiable by performing a so-called reciprocal blast search. Typically, this involves a first BLAST involving BLASTing a query sequence (for example using any of the sequences listed in Table A of Example 1) against any sequence database, such as the publicly available NCBI database. BLASTN or TBLASTX (using standard default values) are generally used when starting from a nucleotide sequence, and BLASTP or TBLASTN (using standard default values) when starting from a protein sequence. The BLAST results may optionally be filtered. The full-length sequences of either the filtered results or non-filtered results are then BLASTed back (second BLAST) against sequences from the organism from which the query sequence is derived (where the query sequence is SEQ ID NO: 1 or SEQ ID NO: 2, the second BLAST would therefore be against Synechocystis sequences). The results of the first and second BLASTs are then compared. A paralogue is identified if a high-ranking hit from the first blast is from the same species as from which the query sequence is derived, a BLAST back then ideally results in the query sequence amongst the highest hits; an orthologue is identified if a high-ranking hit in the first BLAST is not from the same species as from which the query sequence is derived, and preferably results upon BLAST back in the query sequence being among the highest hits.

[0124] Examples of nucleic acids encoding Class III U-Box polypeptides are given in Table A of Example 1 herein. Such nucleic acids are useful in performing the methods of the invention. The amino acid sequences given in Table A of Example 1 are example sequences of orthologues and paralogues of the Class III U-Box polypeptide represented by SEQ ID NO: 75, the terms “orthologues” and “paralogues” being as defined herein. Further orthologues and paralogues may readily be identified by performing a so-called reciprocal blast search. Typically, this involves a first BLAST involving BLASTing a query sequence (for example using any of the sequences listed in Table A of Example 1) against any sequence database, such as the publicly available NCBI database. BLASTN or TBLASTX (using standard default values) are generally used when starting from a nucleotide sequence, and BLASTP or TBLASTN (using standard default values) when starting from a protein sequence. The BLAST results may optionally be filtered. The full-length sequences of either the filtered results or non-filtered results are then BLASTed back (second BLAST) against sequences from the organism from which the query sequence is derived (where the query sequence is SEQ ID NO: 74 or SEQ ID NO: 75, the second BLAST would therefore be against Capsicum sequences). The results of the first and second BLASTs are then compared. A paralogue is identified if a high-ranking hit from the first blast is from the same species as from which the query sequence is derived, a BLAST back then ideally results in the query sequence amongst the highest hits; an orthologue is identified if a high-ranking hit in the first BLAST is not from the same species as from which the query sequence is derived, and preferably results upon BLAST back in the query sequence being among the highest hits.

[0125] A “PQQC polypeptide” as defined herein refers to the PQQC polypeptide represented by SEQ ID NO: 105 and to orthologues and paralogues thereof. Orthologues and paralogues of SEQ ID NO: 105 are identifiable by performing a so-called reciprocal blast search. Typically, this involves a first BLAST involving BLASTing a query sequence (for example using any of the sequences listed in Table A of Example 1) against any sequence database, such as the publicly available NCBI database. BLASTN or TBLASTX (using standard default values) are generally used when starting from a nucleotide sequence, and BLASTP or TBLASTN (using standard default values) when starting from a protein sequence. The BLAST results may optionally be filtered. The full-length sequences of either the filtered results or non-filtered results are then BLASTed back (second BLAST) against sequences from the organism from which the query sequence is derived (where the query sequence is SEQ ID NO: 104 or SEQ ID NO: 105, the second BLAST would therefore be against Pseudomonas sequences). The results of the first and second BLASTs are then compared. A paralogue is identified if a high-ranking hit from the first blast is from the same species as from which the query sequence is derived, a BLAST back then ideally results in the query sequence amongst the highest hits; an orthologue is identified if a high-ranking hit in the first BLAST is not from the same species as from which the query sequence is derived, and preferably results upon BLAST back in the query sequence being among the highest hits.

[0126] High-ranking hits are those having a low E-value. The lower the E-value, the more significant the score (or in other words the lower the chance that the hit was found by chance). Computation of the E-value is well known in the art. In addition to E-values, comparisons are also scored by percentage identity. Percentage identity refers to the number of identical nucleotides (or amino acids) between the two compared nucleic acid (or polypeptide) sequences over a particular length. In the case of large families, ClustalW may be used, followed by a neighbour joining tree, to help visualize clustering of related genes and to identify orthologues and paralogues.

[0127] Preferably, PEPC polypeptides have, in increasing order of preference, at least 30%, 35% 40%, 45%, 50%, 55%, 60%, 65%, 70%, 75%, 80%, 85%, 90%, 95%, 96%, 97%, 98% or 99% or more sequence identity to the polypeptide represented by SEQ ID NO: 2.

[0128] Preferably, PEPC polypeptides have a conserved C-terminal region having, in increasing order of preference, at least 70%, 75%, 80%, 85%, 90%, 95%, 96%, 97%, 98% or 99% or more sequence identity to the C-terminal region of the polypeptide represented by SEQ ID NO: 2. A person skilled in the art will be well aware of the extent of a C-terminal region of a protein. The C-terminal region may be regarded as about the last third of a protein.

[0129] PEPC polypeptides comprise several motifs which are well-conserved across PEPC-containing species. For example, Motifs I to IV below are typically found in both plant and microorganism PEPCs.

### Motif I: QEIMVGYSDSNKD

### Motif II: FHGRGGSVGRGGGPAYKAIL

### Motif III: LRAIPWVF

### Motif IV: GIAAGMRNTG

[0130] PEPCs useful in the methods of the invention therefore preferably comprise any one or more of Motifs I to IV.

[0131] PEPCs useful in the methods of the invention may also comprise a motif having, in increasing order of preference, at least 65% 70%, 75%, 80%, 85%, 90%, 95%, 96%, 97%, 98% or 99% identity to any one or more of Motifs I to IV.

Motif I is preferably: QE V/I M I/L/V GYSDS G/N/S K D/F.
Motif II is preferably: FHGRGG T/S V/I GRGGGP T/S/A H/Y L/I/E/D/K AI L/Q/V.
Motif III is preferably: LRAIPW I/L/V F.
Motif IV is preferably: G I/V A/S AG L/M Q/R/K N T/S G.

[0132] PEPC polypeptides from microorganisms also comprise several motifs that are well-conserved across microorganisms, for example, Motif V below.

### Motif V: SGFLSSNWE

[0133] Motif V is preferably: S/G G F/I L/T/V S/T S N/Q/G WE

[0134] Motif V or a motif having, in increasing order of preference, at least 65% 70%, 75%, 80%, 85%, 90%, 95%, 96%, 97%, 98% or 99% to Motif V may be useful in performing the methods of the invention.

[0135] PEPC polypeptides from plants also comprise several motifs that are well-conserved across plants, for example, Motif VI below.

### Motif VI: SYKEWPEDKR

[0136] Motif VI is preferably: S/T Y S/L/K/A/R/Q E/K/D W S/P/T/D E E/D R/G/K/Q R/K

[0137] Motif VI or a motif having, in increasing order of preference, at least 65% 70%, 75%, 80%, 85%, 90%, 95%, 96%, 97%, 98% or 99% to Motif VI may be useful in performing the methods of the invention.

[0138] A “Class III U-Box polypeptide” as defined herein refers to any polypeptide comprising:

[0139] A U-Box domain in the N-terminal region of a protein.

[0140] Preferably, the U-box domain has, in increasing order of preference, at least 50%, 55%, 60%, 65%, 70%, 75%, 80%, 85%, 90%, 95%, 96%, 97%, 98%, 99% or more sequence identity to the U-box domain of SEQ ID NO: 76; and/or comprises Motif VII: GI T/S YDR E/S/D/A N/S/G/A I E/A K/R/M W L/M/V/I F/L/A and/or Motif II: Q S/A/G W C/G/A I/R/A/T S/V/L/R/A H/N/R/N/V A/C/S.

Most preferably, Motif VII is: GITYDRENIERWIF (SEQ ID NO: 77), or a motif having in increasing order of preference, at least 60%, 65%, 70%, 75%, 80%, 85%, 90%, 95%, 96%, 97%, 98%, 99% or more sequence identity to Motif VII; and
Motif VIII is: QSWCTLNA (SEQ ID NO: 78) or a motif having in increasing order of preference, at least 60%, 65%, 70%, 75%, 80%, 85%, 90%, 95%, 96%, 97%, 98%, 99% or more sequence identity to Motif VIII.

[0141] Additionally, the Class III U-Box polypeptide may comprise in its C-terminal region one or more of the following motifs:

### Motif IX: GR S/A/L A/E L/F L/V S/K/N/A H

### Motif X: G/A I/L/V A A/I/V V S/C/A/G/T K/C/R R/K/A A/I/V/T M/L/T R V/L/I S/P

### Motif XI: K/R L C/L F/V/M/L V/L/A V/L/A/I Q/R V/A/S D/S/G/E

### Motif XII: S/A/L YP

[0142] Most preferably, Motif IX is: GRAELLNH (SEQ ID NO: 79) or a motif having in increasing order of preference, at least 60%, 65%, 70%, 75%, 80%, 85%, 90%, 95%, 96%, 97%, 98%, 99% or more sequence identity to Motif IX;
Motif X is: GLAIVSKKILRVS (SEQ ID NO: 80) or a motif having in increasing order of preference, at least 60%, 65%, 70%, 75%, 80%, 85%, 90%, 95%, 96%, 97%, 98%, 99% or more sequence identity to Motif X;
Motif XI is: KLCLVLQVD (SEQ ID NO: 81) or a motif having in increasing order of preference, at least 60%, 65%, 70%, 75%, 80%, 85%, 90%, 95%, 96%, 97%, 98%, 99% or more sequence identity to Motif XI; and
Motif XII is: SYP (SEQ ID NO: 82) or a motif having in increasing order of preference, at least 60%, 65%, 70%, 75%, 80%, 85%, 90%, 95%, 96%, 97%, 98%, 99% or more sequence identity to Motif XII.

[0143] Class III U-Box polypeptides typically cluster with other Class III U-Box polypeptides rather than with any other class of U-box protein in a phylogenetic tree comprising full length U-box proteins.

[0144] Class III U-Box polypeptides typically have, in increasing order of preference, at least 50%, 55%, 60%, 65%, 70%, 75%, 80%, 85%, 90%, 95%, 96%, 97%, 98%, 99% or more sequence identity to the Class III U-box polypeptide represented by SEQ ID NO: 75.

[0145] Preferably, PQQC polypeptides have, in increasing order of preference, at least 45%, 50%, 55%, 60%, 65%, 70%, 75%, 80%, 85%, 90%, 95%, 96%, 97%, 98% or 99% or more sequence identity to the polypeptide represented by SEQ ID NO: 105.

[0146] Examples of nucleic acids encoding PQQC polypeptides are given in Table A of Example 1 herein. Such nucleic acids are useful in performing the methods of the invention. The amino acid sequences given in Table A of Example 1 are examples of orthologues and paralogues of the PQQC polypeptide represented by SEQ ID NO: 105, the terms “orthologues” and “paralogues” being as defined herein.

[0147] The term “domain” and “motif” is defined in the “definitions” section herein. Specialist databases exist for the identification of domains, for example, SMART (Schultz et al. (1998) Proc. Natl. Acad. Sci. USA 95, 5857-5864; Letunic et al. (2002) Nucleic Acids Res 30, 242-244), InterPro (Mulder et al., (2003) Nucl. Acids. Res. 31, 315-318), Prosite (Bucher and Bairoch (1994), A generalized profile syntax for biomolecular sequences motifs and its function in automatic sequence interpretation. (In) ISMB-94; Proceedings 2nd International Conference on Intelligent Systems for Molecular Biology. Altman R., Brutlag D., Karp P., Lathrop R., Searls D., Eds., pp 53-61, AAAI Press, Menlo Park; Hulo et al., Nucl. Acids. Res. 32:D134-D137, (2004)), or Pfam (Bateman et al., Nucleic Acids Research 30(1): 276-280 (2002)). A set of tools for in silico analysis of protein sequences is available on the ExPASy proteomics server (Swiss Institute of Bioinformatics (Gasteiger et al., ExPASy: the proteomics server for in-depth protein knowledge and analysis, Nucleic Acids Res. 31:3784-3788 (2003)). Domains or motifs may also be identified using routine techniques, such as by sequence alignment.

[0148] Methods for the alignment of sequences for comparison are well known in the art, such methods include GAP, BESTFIT, BLAST, FASTA and TFASTA. GAP uses the algorithm of Needleman and Wunsch ((1970) J Mol Biol 48: 443-453) to find the global (i.e. spanning the complete sequences) alignment of two sequences that maximizes the number of matches and minimizes the number of gaps. The BLAST algorithm (Altschul et al. (1990) J Mol Biol 215: 403-10) calculates percent sequence identity and performs a statistical analysis of the similarity between the two sequences. The software for performing BLAST analysis is publicly available through the National Centre for Biotechnology Information (NCBI). Homologues may readily be identified using, for example, the ClustalW multiple sequence alignment algorithm (version 1.83), with the default pairwise alignment parameters, and a scoring method in percentage. Global percentages of similarity and identity may also be determined using one of the methods available in the MatGAT software package (Campanella et al., BMC Bioinformatics. 2003 Jul. 10; 4:29. MatGAT: an application that generates similarity/identity matrices using protein or DNA sequences). Minor manual editing may be performed to optimise alignment between conserved motifs, as would be apparent to a person skilled in the art. Furthermore, instead of using full-length sequences for the identification of homologues, specific domains may also be used. The sequence identity values may be determined over the entire nucleic acid or amino acid sequence or over selected domains or conserved motif(s), using the programs mentioned above using the default parameters.

[0149] Examples of nucleic acids encoding PEPC polypeptides are given in Table A of Example 1 herein. Such nucleic acids are useful in performing the methods of the invention. The amino acid sequences given in Table A of Example 1 are examples of orthologues and paralogues of the PEPC polypeptide represented by SEQ ID NO: 2, the terms “orthologues” and “paralogues” being as defined herein.

[0150] Another preferred feature of PEPC is that it catalyzes the addition of CO₂ to phosphoenolpyruvate (PEP) to form the four-carbon compound oxaloacetate:

PEP+CO₂→oxaloacetate+Pi

[0151] For a description of the measurement of PEPC activity, see Chen et al., 2002 (Plant Cell Physiol 43(2): 159-169); and Chen et al., 2004 (Planta 219 pp 440-449).

[0152] Another feature of the PEPC is that it falls under Enzyme Classification code EC 4.1.1.31

[0153] In one embodiment the present invention is illustrated by transforming plants with the nucleic acid sequence represented by SEQ ID NO: 1, encoding the polypeptide sequence of SEQ ID NO: 2. However, performance of the invention is not restricted to these sequences; the methods of the invention may advantageously be performed using any PEPC-encoding nucleic acid or PEPC polypeptide as defined herein.

[0154] Furthermore, Class III U-Box polypeptides (at least in their native form) typically have E3 ubiquitin ligase activity (see Cho et al., 2006).

[0155] In one embodiment the present invention is illustrated by transforming plants with the nucleic acid sequence represented by SEQ ID NO: 74, encoding the polypeptide sequence of SEQ ID NO: 75. However, performance of the invention is not restricted to these sequences; the methods of the invention may advantageously be performed using any Class III U-Box-encoding nucleic acid or Class III U-Box polypeptide as defined herein.

[0156] Another feature of PQQC is that it catalyses the last step in PQQ biosynthesis.

[0157] In one embodiment the present invention is illustrated by transforming plants with the nucleic acid sequence represented by SEQ ID NO: 104, encoding the polypeptide sequence of SEQ ID NO: 105. However, performance of the invention is not restricted to these sequences; the methods of the invention may advantageously be performed using any PQQC-encoding nucleic acid or PQQC polypeptide as defined herein.

[0158] Nucleic acid variants may also be useful in practising the methods of the invention. Examples of such variants include nucleic acids encoding homologues and derivatives of any one of the amino acid sequences given in Table A of Example 1, the terms “homologue” and “derivative” being as defined herein. Also useful in the methods of the invention are nucleic acids encoding homologues and derivatives of orthologues or paralogues of any one of the amino acid sequences given in Table A of Example 1. Homologues and derivatives useful in the methods of the present invention have substantially the same biological and functional activity as the unmodified protein from which they are derived.

[0159] Further nucleic acid variants useful in practising the methods of the invention include portions of nucleic acids encoding yield increasing polypeptide selected from the group consisting of:

PEPC, Class III U-Box and PQQC polypeptides, nucleic acids hybridising to nucleic acids encoding yield increasing polypeptide selected from the group consisting of:
PEPC, Class III U-Box and PQQC polypeptides, splice variants of nucleic acids encoding yield increasing polypeptide selected from the group consisting of: PEPC, Class III U-Box and PQQC polypeptides, allelic variants of nucleic acids encoding yield increasing polypeptide selected from the group consisting of: PEPC, Class III U-Box and PQQC polypeptides and variants of nucleic acids encoding yield increasing polypeptide selected from the group consisting of: PEPC, Class III U-Box and PQQC polypeptides obtained by gene shuffling. The terms hybridising sequence, splice variant, allelic variant and gene shuffling are as described herein.

[0160] Nucleic acids encoding yield increasing polypeptide selected from the group consisting of: PEPC, Class III U-Box and PQQC polypeptides need not be full-length nucleic acids, since performance of the methods of the invention does not rely on the use of full-length nucleic acid sequences. According to the present invention, there is provided a method for enhancing yield-related traits in plants, comprising introducing and expressing in a plant a portion of any one of the nucleic acid sequences given in Table A of Example 1, or a portion of a nucleic acid encoding an orthologue, paralogue or homologue of any of the amino acid sequences given in Table A of Example 1.

[0161] A portion of a nucleic acid may be prepared, for example, by making one or more deletions to the nucleic acid. The portions may be used in isolated form or they may be fused to other coding (or non-coding) sequences in order to, for example, produce a protein that combines several activities. When fused to other coding sequences, the resultant polypeptide produced upon translation may be bigger than that predicted for the protein portion.

[0162] In one embodiment the portions useful in the methods of the invention, encode a PEPC polypeptide as defined herein, and have substantially the same biological activity as the amino acid sequences given in Table A of Example 1. Preferably, the portion is a portion of any one of the nucleic acids given in Table A of Example 1, or is a portion of a nucleic acid encoding an orthologue or paralogue of any one of the amino acid sequences given in Table A of Example 1. Preferably the portion is at least 2000, 2250, 2500, 2750, 3000, 3100 consecutive nucleotides in length, the consecutive nucleotides being of any one of the nucleic acid sequences given in Table A of Example 1, or of a nucleic acid encoding an orthologue or paralogue of any one of the amino acid sequences given in Table A of Example 1. Most preferably the portion is a portion of the nucleic acid of SEQ ID NO: 1.

[0163] In one embodiment the portions useful in the methods of the invention, encode a Class III U-Box polypeptide as defined herein, and have substantially the same biological activity as the amino acid sequences given in Table A of Example 1. Preferably, the portion is a portion of any one of the nucleic acids given in Table A of Example 1, or is a portion of a nucleic acid encoding an orthologue or paralogue of any one of the amino acid sequences given in Table A of Example 1. Preferably the portion is at least 500, 550, 600, 650, 700, 750, 800, 850, 900, 950, 1000, 1050, 1100, 1150, 1200, 1250, 1300, 1350 consecutive nucleotides in length, the consecutive nucleotides being of any one of the nucleic acid sequences given in Table A of Example 1, or of a nucleic acid encoding an orthologue or paralogue of any one of the amino acid sequences given in Table A of Example 1. Most preferably the portion is a portion of the nucleic acid of SEQ ID NO: 74.

[0164] In one embodiment the portions useful in the methods of the invention, encode a PQQC polypeptide as defined herein, and have substantially the same biological activity as the amino acid sequences given in Table A of Example 1. Preferably, the portion is a portion of any one of the nucleic acids given in Table A of Example 1, or is a portion of a nucleic acid encoding an orthologue or paralogue of any one of the amino acid sequences given in Table A of Example 1. Preferably the portion is at least 500, 550, 600, 650, 700, 750 consecutive nucleotides in length, the consecutive nucleotides being of any one of the nucleic acid sequences given in Table A of Example 1, or of a nucleic acid encoding an orthologue or paralogue of any one of the amino acid sequences given in Table A of Example 1. Most preferably the portion is a portion of the nucleic acid of SEQ ID NO: 104.

[0165] Another nucleic acid variant useful in the methods of the invention is a nucleic acid capable of hybridising, under reduced stringency conditions, preferably under stringent conditions, with a nucleic acid encoding a yield increasing polypeptide selected from the group consisting of: PEPC, Class III U-Box and PQQC polypeptide as defined herein, or with a portion as defined herein.

[0166] According to the present invention, there is provided a method for enhancing yield-related traits in plants, comprising introducing and expressing in a plant a nucleic acid capable of hybridizing to any one of the nucleic acids given in Table A of Example 1, or comprising introducing and expressing in a plant a nucleic acid capable of hybridising to a nucleic acid encoding an orthologue, paralogue or homologue of any of the nucleic acid sequences given in Table A of Example 1.

[0167] Hybridising sequences useful in the methods of the invention encode a PEPC polypeptide as defined herein, having substantially the same biological activity as the amino acid sequences given in Table A of Example 1. Preferably, the hybridising sequence is capable of hybridising to any one of the nucleic acids given in Table A of Example 1, or to a portion of any of these sequences, a portion being as defined above, or the hybridising sequence is capable of hybridising to a nucleic acid encoding an orthologue or paralogue of any one of the amino acid sequences given in Table A of Example 1. Most preferably, the hybridising sequence is capable of hybridising to a nucleic acid as represented by a sequence selected from the group consisting of SEQ ID NO: 1, SEQ ID NO: 74 and SEQ ID NO: 104 or to a portion thereof, a portion being as defined above.

[0168] Another nucleic acid variant useful in the methods of the invention is a splice variant encoding a yield increasing polypeptide selected from the group consisting of: PEPC, Class III U-Box and PQQC polypeptide as defined hereinabove, a splice variant being as defined herein.

[0169] According to the present invention, there is provided a method for enhancing yield-related traits in plants, comprising introducing and expressing in a plant a splice variant of any one of the nucleic acid sequences given in Table A of Example 1, or a splice variant of a nucleic acid encoding an orthologue, paralogue or homologue of any of the amino acid sequences given in Table A of Example 1.

[0170] In one embodiment preferred splice variants are splice variants of a nucleic acid represented by SEQ ID NO: 1, or a splice variant of a nucleic acid encoding an orthologue or paralogue of SEQ ID NO: 2.

[0171] In one embodiment preferred splice variants are splice variants of a nucleic acid represented by SEQ ID NO: 74, or a splice variant of a nucleic acid encoding an orthologue or paralogue of SEQ ID NO: 75.

[0172] In one embodiment preferred splice variants are splice variants of a nucleic acid represented by SEQ ID NO: 104, or a splice variant of a nucleic acid encoding an orthologue or paralogue of SEQ ID NO: 105.

[0173] Another nucleic acid variant useful in performing the methods of the invention is an allelic variant of a nucleic acid encoding a yield increasing polypeptide selected from the group consisting of: phosphoenolpyruvate carboxylase (PEPC), Class III U-Box protein and PQQC polypeptide as defined hereinabove, an allelic variant being as defined herein.

[0174] According to the present invention, there is provided a method for enhancing yield-related traits in plants, comprising introducing and expressing in a plant an allelic variant of any one of the nucleic acids given in Table A of Example 1, or comprising introducing and expressing in a plant an allelic variant of a nucleic acid encoding an orthologue, paralogue or homologue of any of the amino acid sequences given in Table A of Example 1.

[0175] In one embodiment the allelic variants useful in the methods of the present invention have substantially the same biological activity as the PEPC polypeptide of SEQ ID NO: 2 and any of the amino acids depicted in Table A of Example 1. Allelic variants exist in nature, and encompassed within the methods of the present invention is the use of these natural alleles. Preferably, the allelic variant is an allelic variant of SEQ ID NO: 1 or an allelic variant of a nucleic acid encoding an orthologue or paralogue of SEQ ID NO: 2.

[0176] In one embodiment the allelic variants useful in the methods of the present invention have substantially the same biological activity as the Class III U-Box polypeptide of SEQ ID NO: 75 and any of the amino acids depicted in Table A of Example 1. Allelic variants exist in nature, and encompassed within the methods of the present invention is the use of these natural alleles. Preferably, the allelic variant is an allelic variant of SEQ ID NO: 74 or an allelic variant of a nucleic acid encoding an orthologue or paralogue of SEQ ID NO: 75.

[0177] In one embodiment the allelic variants useful in the methods of the present invention have substantially the same biological activity as the PQQC polypeptide of SEQ ID NO: 105 and any of the amino acids depicted in Table A of Example 1. Allelic variants exist in nature, and encompassed within the methods of the present invention is the use of these natural alleles. Preferably, the allelic variant is an allelic variant of SEQ ID NO: 104 or an allelic variant of a nucleic acid encoding an orthologue or paralogue of SEQ ID NO: 105.

[0178] Gene shuffling or directed evolution may also be used to generate variants of nucleic acids encoding yield increasing polypeptide selected from the group consisting of: PEPC, Class III U-Box and PQQC polypeptides as defined above; the term “gene shuffling” being as defined herein.

[0179] According to the present invention, there is provided a method for enhancing yield-related traits in plants, comprising introducing and expressing in a plant a variant of any one of the nucleic acid sequences given in Table A of Example 1, or comprising introducing and expressing in a plant a variant of a nucleic acid encoding an orthologue, paralogue or homologue of any of the amino acid sequences given in Table A of Example 1, which variant nucleic acid is obtained by gene shuffling.

[0180] Furthermore, nucleic acid variants may also be obtained by site-directed mutagenesis. Several methods are available to achieve site-directed mutagenesis, the most common being PCR based methods (Current Protocols in Molecular Biology. Wiley Eds.).

[0181] In one embodiment nucleic acids encoding PEPC polypeptides may be derived from any natural or artificial source. The nucleic acid may be modified from its native form in composition and/or genomic environment through deliberate human manipulation. Preferably the PEPC polypeptide-encoding nucleic acid is bacterial, further preferably from any one of Synechococcus, Anacystis, Anabaena, Nostoc, Prochlorococcus, Arthrobacter, Steptomyces, Kineococcus, Nitobacter, Ralsstonia, Nitrosomonas, Rhodococcus, Rhodopseudomonas, Mycobacterium, Neiseria, Lactobacillus, Corynebacterium, most preferably from Synechocystis.

[0182] In one embodiment nucleic acids encoding Class III U-Box polypeptides may be derived from any natural or artificial source. The nucleic acid may be modified from its native form in composition and/or genomic environment through deliberate human manipulation. Preferably the Class III U-Box polypeptide-encoding nucleic acid is from a plant, further preferably from a dicotyledonous plant, more preferably from the family Solanaceae, most preferably the nucleic acid is from Capsicum annuum.

[0183] In one embodiment nucleic acids encoding PQQC polypeptides may be derived from any natural or artificial source. The nucleic acid may be modified from its native form in composition and/or genomic environment through deliberate human manipulation. Preferably the PQQC polypeptide-encoding nucleic acid is bacterial, further preferably from Pseudomonas.

[0184] Performance of the methods of the invention gives plants having enhanced yield-related traits. In particular performance of the methods of the invention gives plants having increased yield, especially increased seed yield relative to control plants. The terms “yield” and “seed yield” are described in more detail in the “definitions” section herein.

[0185] It was particularly surprising to find that the increase in yield was not manifested in the form of bigger seeds, as might have been expected from the teachings of Radchuck et al., 2007, but was manifested in the form of an array of altered yield-related traits including, but not limited to, increased aboveground area, increased emergence vigour, increased total number of seeds, increased seed weight, increased fill rate, increased number of flowers per panicle, increased number of seeds, increased harvest index, increased height and an increase in the root thickness, each relative to control plants.

[0186] Reference herein to enhanced yield-related traits is taken to mean an increase in biomass (weight) of one or more parts of a plant, which may include aboveground (harvestable) parts and/or (harvestable) parts below ground. In particular, such harvestable parts are seeds, and performance of the methods of the invention results in plants having increased seed yield relative to the seed yield of control plants.

[0187] Taking corn as an example, a yield increase may be manifested as one or more of the following: increase in the number of plants established per hectare or acre, an increase in the number of ears per plant, an increase in the number of rows, number of kernels per row, kernel weight, thousand kernel weight, ear length/diameter, increase in the seed filling rate (which is the number of filled seeds divided by the total number of seeds and multiplied by 100), among others. Taking rice as an example, a yield increase may manifest itself as an increase in one or more of the following: number of plants per hectare or acre, number of panicles per plant, number of spikelets per panicle, number of flowers (florets) per panicle (which is expressed as a ratio of the number of filled seeds over the number of primary panicles), increase in the seed filling rate (which is the number of filled seeds divided by the total number of seeds and multiplied by 100), increase in thousand kernel weight, among others.

[0188] The present invention provides a method for increasing yield, especially seed yield of plants, relative to control plants, which method comprises modulating expression, preferably increasing expression, in a plant of a nucleic acid encoding a yield increasing polypeptide selected from the group consisting of: PEPC, Class III U-Box and PQQC polypeptide as defined herein.

[0189] Since the transgenic plants according to the present invention have increased yield, it is likely that these plants exhibit an increased growth rate (during at least part of their life cycle), relative to the growth rate of control plants at a corresponding stage in their life cycle.

[0190] The increased growth rate may be specific to one or more parts of a plant (including seeds), or may be throughout substantially the whole plant. Plants having an increased growth rate may have a shorter life cycle. The life cycle of a plant may be taken to mean the time needed to grow from a dry mature seed up to the stage where the plant has produced dry mature seeds, similar to the starting material. This life cycle may be influenced by factors such as early vigour, growth rate, greenness index, flowering time and speed of seed maturation. The increase in growth rate may take place at one or more stages in the life cycle of a plant or during substantially the whole plant life cycle. Increased growth rate during the early stages in the life cycle of a plant may reflect enhanced vigour. The increase in growth rate may alter the harvest cycle of a plant allowing plants to be sown later and/or harvested sooner than would otherwise be possible (a similar effect may be obtained with earlier flowering time). If the growth rate is sufficiently increased, it may allow for the further sowing of seeds of the same plant species (for example sowing and harvesting of rice plants followed by sowing and harvesting of further rice plants all within one conventional growing period). Similarly, if the growth rate is sufficiently increased, it may allow for the further sowing of seeds of different plants species (for example the sowing and harvesting of corn plants followed by, for example, the sowing and optional harvesting of soybean, potato or any other suitable plant). Harvesting additional times from the same rootstock in the case of some crop plants may also be possible. Altering the harvest cycle of a plant may lead to an increase in annual biomass production per acre (due to an increase in the number of times (say in a year) that any particular plant may be grown and harvested). An increase in growth rate may also allow for the cultivation of transgenic plants in a wider geographical area than their wild-type counterparts, since the territorial limitations for growing a crop are often determined by adverse environmental conditions either at the time of planting (early season) or at the time of harvesting (late season). Such adverse conditions may be avoided if the harvest cycle is shortened. The growth rate may be determined by deriving various parameters from growth curves, such parameters may be: T-Mid (the time taken for plants to reach 50% of their maximal size) and T-90 (time taken for plants to reach 90% of their maximal size), amongst others.

[0191] According to a preferred feature of the present invention, performance of the methods of the invention gives plants having an increased growth rate relative to control plants. Therefore, according to the present invention, there is provided a method for increasing the growth rate of plants, which method comprises modulating expression, preferably increasing expression, in a plant of a nucleic acid encoding a yield increasing polypeptide selected from the group consisting of: PEPC, Class III U-Box and PQQC polypeptide as defined herein.

[0192] In one embodiment an increase in yield occurs whether the plant is under non-stress conditions or whether the plant is exposed to various stresses compared to control plants. Plants typically respond to exposure to stress by growing more slowly. In conditions of severe stress, the plant may even stop growing altogether. Mild stress on the other hand is defined herein as being any stress to which a plant is exposed which does not result in the plant ceasing to grow altogether without the capacity to resume growth. Mild stress in the sense of the invention leads to a reduction in the growth of the stressed plants of less than 40%, 35% or 30%, preferably less than 25%, 20% or 15%, more preferably less than 14%, 13%, 12%, 11% or 10% or less in comparison to the control plant under non-stress conditions. Due to advances in agricultural practices (irrigation, fertilization, pesticide treatments) severe stresses are not often encountered in cultivated crop plants. As a consequence, the compromised growth induced by mild stress is often an undesirable feature for agriculture. Mild stresses are the everyday biotic and/or abiotic (environmental) stresses to which a plant is exposed. Abiotic stresses may be due to drought or excess water, anaerobic stress, salt stress, chemical toxicity, oxidative stress and hot, cold or freezing temperatures. The abiotic stress may be an osmotic stress caused by a water stress (particularly due to drought), salt stress, oxidative stress or an ionic stress. Biotic stresses are typically those stresses caused by pathogens, such as bacteria, viruses, fungi and insects.

[0193] In particular, the methods of the present invention may be performed under non-stress conditions or under conditions of mild drought to give plants having increased yield relative to control plants. As reported in Wang et al. (Planta (2003) 218: 1-14), abiotic stress leads to a series of morphological, physiological, biochemical and molecular changes that adversely affect plant growth and productivity. Drought, salinity, extreme temperatures and oxidative stress are known to be interconnected and may induce growth and cellular damage through similar mechanisms. Rabbani et al. (Plant Physiol (2003) 133: 1755-1767) describes a particularly high degree of “cross talk” between drought stress and high-salinity stress. For example, drought and/or salinisation are manifested primarily as osmotic stress, resulting in the disruption of homeostasis and ion distribution in the cell. Oxidative stress, which frequently accompanies high or low temperature, salinity or drought stress, may cause denaturing of functional and structural proteins. As a consequence, these diverse environmental stresses often activate similar cell signalling pathways and cellular responses, such as the production of stress proteins, up-regulation of anti-oxidants, accumulation of compatible solutes and growth arrest. The term “non-stress” conditions as used herein are those environmental conditions that allow optimal growth of plants. Persons skilled in the art are aware of normal soil conditions and climatic conditions for a given location.

[0194] In one embodiment an increase in yield occurs whether the plant is under non-stress conditions or under conditions of mild drought. Performance of the methods of the invention gives plants grown under non-stress conditions or under mild drought conditions increased yield relative to control plants grown under comparable conditions. Therefore, according to the present invention, there is provided a method for increasing yield in plants grown under non-stress conditions or under mild drought conditions, which method comprises increasing expression in a plant of a nucleic acid encoding a yield increasing polypeptide selected from the group consisting of: PEPC, Class III U-Box and PQQC polypeptide.

[0195] Performance of the methods of the invention gives plants grown under conditions of nutrient deficiency, particularly under conditions of nitrogen deficiency, increased yield relative to control plants grown under comparable conditions. Therefore, according to the present invention, there is provided a method for increasing yield in plants grown under conditions of nutrient deficiency, which method comprises increasing expression in a plant of a nucleic acid encoding a yield increasing polypeptide selected from the group consisting of: PEPC, Class III U-Box and PQQC polypeptide. Nutrient deficiency may result from a lack of nutrients such as nitrogen, phosphates and other phosphorous-containing compounds, potassium, calcium, cadmium, magnesium, manganese, iron and boron, amongst others.

[0196] The present invention encompasses plants or parts thereof (including seeds) obtainable by the methods according to the present invention. The plants or parts thereof comprise a nucleic acid transgene encoding a yield increasing polypeptide selected from the group consisting of: PEPC, Class III U-Box and PQQC polypeptide as defined above.

[0197] The invention also provides genetic constructs and vectors to facilitate introduction and/or expression in plants of nucleic acids encoding yield increasing polypeptide selected from the group consisting of: PEPC, Class III U-Box and PQQC polypeptides. The gene constructs may be inserted into vectors, which may be commercially available, suitable for transforming into plants and suitable for expression of the gene of interest in the transformed cells. The invention also provides use of a gene construct as defined herein in the methods of the invention.

[0198] More specifically, the present invention provides a construct comprising:
[0199] (a) a nucleic acid encoding a yield increasing polypeptide selected from the group consisting of: PEPC, Class III U-Box and PQQC polypeptide as defined above;
[0200] (b) one or more control sequences capable of driving expression of the nucleic acid sequence of (a); and optionally
[0201] (c) a transcription termination sequence.

[0202] Preferably, the nucleic acid encoding a PEPC polypeptide is as defined above.

[0203] Preferably, the nucleic acid encoding a Class III U-Box polypeptide is as defined above.

[0204] Preferably, the nucleic acid encoding a PQQC polypeptide is as defined above.

[0205] The term “control sequence” and “termination sequence” are as defined herein.

[0206] Plants are transformed with a vector comprising any of the nucleic acids described above. The skilled artisan is well aware of the genetic elements that must be present on the vector in order to successfully transform, select and propagate host cells containing the sequence of interest. The sequence of interest is operably linked to one or more control sequences (at least to a promoter).

[0207] Advantageously, any type of promoter, whether natural or synthetic, may be used to drive expression of the nucleic acid sequence. See the “Definitions” section herein for definitions of the various promoter types.

[0208] A young green tissue-specific promoter is particularly useful in the methods.

[0209] In one embodiment the PEPC-encoding nucleic acid is operably linked to a young green tissue-specific promoter as defined herein. The young green tissue-specific promoter is preferably a protochlorophyllid reductase (PcR) promoter, more preferably the protochlorophyllid reductase promoter represented by a nucleic acid sequence substantially similar to SEQ ID NO: 71, most preferably the promoter is as represented by SEQ ID NO: 71.

[0210] In one embodiment the Class III U-box-encoding nucleic acid is operably linked to a young green tissue-specific promoter as defined herein. The young green tissue-specific promoter is preferably a protochlorophyllid reductase (PcR) promoter, more preferably the protochlorophyllid reductase promoter represented by a nucleic acid sequence substantially similar to SEQ ID NO: 101, most preferably the promoter is as represented by SEQ ID NO: 101.

[0211] In one embodiment the PQQC-encoding nucleic acid is operably linked to a young green tissue-specific promoter as defined herein. The young green tissue-specific promoter is preferably a protochlorophyllide reductase (PcR) promoter, more preferably the protochlorophyllide reductase promoter represented by a nucleic acid sequence substantially similar to SEQ ID NO: 131, most preferably the promoter is as represented by SEQ ID NO: 131.

[0212] Furthermore, a constitutive promoter is particularly useful in the methods. The constitutive promoter is preferably a GOS2 promoter, preferably a GOS2 promoter from rice. Further preferably the constitutive promoter is represented by a nucleic acid sequence substantially similar to SEQ ID NO: 227, most preferably the constitutive promoter is as represented by SEQ ID NO: 227. See Table 2 in the “Definitions” section herein for further examples of constitutive promoters.

[0213] It should be clear that the applicability of the present invention is not restricted to the PEPC-encoding nucleic acid represented by SEQ ID NO: 1, nor is the applicability of the invention restricted to expression of such a PEPC-encoding nucleic acid when driven by a protochlorophyllid reductase promoter. It should be clear that the applicability of the present invention is not restricted to the U-box-encoding nucleic acid represented by SEQ ID NO: 74, nor is the applicability of the invention restricted to expression of such a U-box-encoding nucleic acid when driven by a protochlorophyllid reductase promoter. It should be clear that the applicability of the present invention is not restricted to the PQQC-encoding nucleic acid represented by SEQ ID NO: 104, nor is the applicability of the invention restricted to expression of such a PQQC-encoding nucleic acid when driven by a protochlorophyllide reductase promoter or when driven by a GOS2 promoter.

[0214] Examples of other (young) green tissue-specific promoters which may also be used to perform the methods of the invention are shown in Table 2g herein and examples of other constitutive promoters are also given, see Table 2a.

[0215] Optionally, one or more terminator sequences may be used in the construct introduced into a plant. Additional regulatory elements may include transcriptional as well as translational enhancers. Those skilled in the art will be aware of terminator and enhancer sequences that may be suitable for use in performing the invention. An intron sequence may also be added to the 5′ untranslated region (UTR) or in the coding sequence to increase the amount of the mature message that accumulates in the cytosol, as described in the definitions section. Other control sequences (besides promoter, enhancer, silencer, intron sequences, 3′UTR and/or 5′UTR regions) may be protein and/or RNA stabilizing elements. Such sequences would be known or may readily be obtained by a person skilled in the art.

[0216] The genetic constructs of the invention may further include an origin of replication sequence that is required for maintenance and/or replication in a specific cell type. One example is when a genetic construct is required to be maintained in a bacterial cell as an episomal genetic element (e.g. plasmid or cosmid molecule). Preferred origins of replication include, but are not limited to, the f1-ori and colE1.

[0217] For the detection of the successful transfer of the nucleic acid sequences as used in the methods of the invention and/or selection of transgenic plants comprising these nucleic acids, it is advantageous to use marker genes (or reporter genes). Therefore, the genetic construct may optionally comprise a selectable marker gene. Selectable markers are described in more detail in the “definitions” section herein. The marker genes may be removed or excised from the transgenic cell once they are no longer needed. Techniques for marker removal are known in the art, useful techniques are described above in the definitions section.

[0218] The invention also provides a method for the production of transgenic plants having enhanced yield-related traits relative to control plants, comprising introduction and expression in a plant of any nucleic acid encoding a yield increasing polypeptide selected from the group consisting of: PEPC, Class III U-Box and PQQC polypeptide as defined hereinabove.

[0219] More specifically, the present invention provides a method for the production of transgenic plants having increased enhanced yield-related traits, particularly increased (seed) yield, which method comprises:
[0220] (i) introducing and expressing in a plant or plant cell a—nucleic acid encoding a yield increasing polypeptide selected from the group consisting of: PEPC, Class III U-Box and PQQC; and
[0221] (ii) cultivating the plant cell under conditions promoting plant growth and development.

[0222] In one embodiment the nucleic acid of (i) may be any of the nucleic acids capable of encoding a PEPC polypeptide as defined herein.

[0223] In one embodiment the nucleic acid of (i) may be any of the nucleic acids capable of encoding a Class III U-Box polypeptide as defined herein.

[0224] In one embodiment the nucleic acid of (i) may be any of the nucleic acids capable of encoding a PQQC polypeptide as defined herein.

[0225] The nucleic acid may be introduced directly into a plant cell or into the plant itself (including introduction into a tissue, organ or any other part of a plant). According to a preferred feature of the present invention, the nucleic acid is preferably introduced into a plant by transformation. The term “transformation” is described in more detail in the “definitions” section herein.

[0226] The genetically modified plant cells can be regenerated via all methods with which the skilled worker is familiar. Suitable methods can be found in the above-mentioned publications by S. D. Kung and R. Wu, Potrykus or Höfgen and Willmitzer.

[0227] Generally after transformation, plant cells or cell groupings are selected for the presence of one or more markers which are encoded by plant-expressible genes co-transferred with the gene of interest, following which the transformed material is regenerated into a whole plant. To select transformed plants, the plant material obtained in the transformation is, as a rule, subjected to selective conditions so that transformed plants can be distinguished from untransformed plants. For example, the seeds obtained in the above-described manner can be planted and, after an initial growing period, subjected to a suitable selection by spraying. A further possibility consists in growing the seeds, if appropriate after sterilization, on agar plates using a suitable selection agent so that only the transformed seeds can grow into plants. Alternatively, the transformed plants are screened for the presence of a selectable marker such as the ones described above.

[0228] Following DNA transfer and regeneration, putatively transformed plants may also be evaluated, for instance using Southern analysis, for the presence of the gene of interest, copy number and/or genomic organisation. Alternatively or additionally, expression levels of the newly introduced DNA may be monitored using Northern and/or Western analysis, both techniques being well known to persons having ordinary skill in the art.

[0229] The generated transformed plants may be propagated by a variety of means, such as by clonal propagation or classical breeding techniques. For example, a first generation (or T1) transformed plant may be selfed and homozygous second-generation (or T2) transformants selected, and the T2 plants may then further be propagated through classical breeding techniques. The generated transformed organisms may take a variety of forms. For example, they may be chimeras of transformed cells and non-transformed cells; clonal transformants (e.g., all cells transformed to contain the expression cassette); grafts of transformed and untransformed tissues (e.g., in plants, a transformed rootstock grafted to an untransformed scion).

[0230] The present invention clearly extends to any plant cell or plant produced by any of the methods described herein, and to all plant parts and propagules thereof. The present invention extends further to encompass the progeny of a primary transformed or transfected cell, tissue, organ or whole plant that has been produced by any of the aforementioned methods, the only requirement being that progeny exhibit the same genotypic and/or phenotypic characteristic(s) as those produced by the parent in the methods according to the invention.

[0231] The invention also includes host cells containing an isolated nucleic acid encoding a yield increasing polypeptide selected from the group consisting of: PEPC, Class III U-Box and PQQC polypeptide as defined hereinabove. Preferred host cells according to the invention are plant cells. Host plants for the nucleic acids or the vector used in the method according to the invention, the expression cassette or construct or vector are, in principle, advantageously all plants, which are capable of synthesizing the polypeptides used in the inventive method.

[0232] The methods of the invention are advantageously applicable to any plant. Plants that are particularly useful in the methods of the invention include all plants which belong to the superfamily Viridiplantae, in particular monocotyledonous and dicotyledonous plants including fodder or forage legumes, ornamental plants, food crops, trees or shrubs. According to a preferred embodiment of the present invention, the plant is a crop plant. Examples of crop plants include soybean, sunflower, canola, alfalfa, rapeseed, cotton, tomato, potato and tobacco. Further preferably, the plant is a monocotyledonous plant. Examples of monocotyledonous plants include sugarcane.

[0233] More preferably the plant is a cereal. Examples of cereals include rice, maize, wheat, barley, millet, rye, triticale, sorghum and oats.

[0234] The invention also extends to harvestable parts of a plant such as, but not limited to seeds, leaves, fruits, flowers, stems, roots, rhizomes, tubers and bulbs. The invention furthermore relates to products derived, preferably directly derived, from a harvestable part of such a plant, such as dry pellets or powders, oil, fat and fatty acids, starch or proteins.

[0235] According to a preferred feature of the invention, the modulated expression is increased expression. Methods for increasing expression of nucleic acids or genes, or gene products, are well documented in the art and examples are provided in the definitions section.

[0236] As mentioned above, a preferred method for modulating (preferably, increasing) expression of a nucleic acid encoding a yield increasing polypeptide selected from the group consisting of: PEPC, Class III U-Box and PQQC polypeptide is by introducing and expressing in a plant a nucleic acid encoding a yield increasing polypeptide selected from the group consisting of: PEPC, Class III U-Box and PQQC polypeptide; however the effects of performing the method, i.e. enhancing yield-related traits may also be achieved using other well known techniques, including but not limited to T-DNA activation tagging, TILLING, homologous recombination. A description of these techniques is provided in the definitions section.

[0237] In one embodiment the present invention also encompasses use of nucleic acids encoding PEPC polypeptides as described herein and use of these PEPC polypeptides in enhancing any of the aforementioned yield-related traits in plants.

[0238] In one embodiment the present invention also encompasses use of nucleic acids encoding Class III U-Box polypeptides as described herein and use of these Class III U-Box polypeptides in enhancing any of the aforementioned yield-related traits in plants.

[0239] In one embodiment the present invention also encompasses use of nucleic acids encoding PQQC polypeptides as described herein and use of these PQQC polypeptides in enhancing any of the aforementioned yield-related traits in plants.

[0240] Nucleic acids encoding a yield increasing polypeptide selected from the group consisting of: PEPC, Class III U-Box and PQQC polypeptide described herein, or the yield increasing polypeptide selected from the group consisting of: PEPC, Class III U-Box and PQQC polypeptides themselves, may find use in breeding programmes in which a DNA marker is identified which may be genetically linked to a yield increasing polypeptide selected from the group consisting of: PEPC, Class III U-Box and PQQC polypeptide-encoding gene. The nucleic acids/genes, or the yield increasing polypeptide selected from the group consisting of: PEPC, Class III U-Box and PQQC polypeptides themselves may be used to define a molecular marker. This DNA or protein marker may then be used in breeding programmes to select plants having enhanced yield-related traits as defined hereinabove in the methods of the invention.

[0241] Allelic variants of a yield increasing polypeptide selected from the group consisting of: PEPC, Class III U-Box and PQQC polypeptide-encoding nucleic acid/gene may also find use in marker-assisted breeding programmes. Such breeding programmes sometimes require introduction of allelic variation by mutagenic treatment of the plants, using for example EMS mutagenesis; alternatively, the programme may start with a collection of allelic variants of so called “natural” origin caused unintentionally. Identification of allelic variants then takes place, for example, by PCR. This is followed by a step for selection of superior allelic variants of the sequence in question and which give increased yield. Selection is typically carried out by monitoring growth performance of plants containing different allelic variants of the sequence in question. Growth performance may be monitored in a greenhouse or in the field. Further optional steps include crossing plants in which the superior allelic variant was identified with another plant. This could be used, for example, to make a combination of interesting phenotypic features.

[0242] Nucleic acids encoding a yield increasing polypeptide selected from the group consisting of: PEPC, Class III U-Box and PQQC polypeptides may also be used as probes for genetically and physically mapping the genes that they are a part of, and as markers for traits linked to those genes. Such information may be useful in plant breeding in order to develop lines with desired phenotypes. Such use of a yield increasing polypeptide selected from the group consisting of: PEPC, Class III U-Box and PQQC polypeptide-encoding nucleic acids requires only a nucleic acid sequence of at least 15 nucleotides in length. The yield increasing polypeptide selected from the group consisting of: PEPC, Class III U-Box and PQQC polypeptide-encoding nucleic acids may be used as restriction fragment length polymorphism (RFLP) markers. Southern blots (Sambrook J, Fritsch E F and Maniatis T (1989) Molecular Cloning, A Laboratory Manual) of restriction-digested plant genomic DNA may be probed with the yield increasing polypeptide selected from the group consisting of: PEPC, Class III U-Box and PQQC-encoding nucleic acids. The resulting banding patterns may then be subjected to genetic analyses using computer programs such as MapMaker (Lander et al. (1987) Genomics 1: 174-181) in order to construct a genetic map. In addition, the nucleic acids may be used to probe Southern blots containing restriction endonuclease-treated genomic DNAs of a set of individuals representing parent and progeny of a defined genetic cross. Segregation of the DNA polymorphisms is noted and used to calculate the position of the yield increasing polypeptide selected from the group consisting of: PEPC, Class III U-Box and PQQC polypeptide-encoding nucleic acid in the genetic map previously obtained using this population (Botstein et al. (1980) Am. J. Hum. Genet. 32:314-331).

[0243] The production and use of plant gene-derived probes for use in genetic mapping is described in Bernatzky and Tanksley (1986) Plant Mol. Biol. Reporter 4: 37-41. Numerous publications describe genetic mapping of specific cDNA clones using the methodology outlined above or variations thereof. For example, F2 intercross populations, backcross populations, randomly mated populations, near isogenic lines, and other sets of individuals may be used for mapping. Such methodologies are well known to those skilled in the art.

[0244] The nucleic acid probes may also be used for physical mapping (i.e., placement of sequences on physical maps; see Hoheisel et al. In: Non-mammalian Genomic Analysis: A Practical Guide, Academic press 1996, pp. 319-346, and references cited therein).

[0245] In another embodiment, the nucleic acid probes may be used in direct fluorescence in situ hybridisation (FISH) mapping (Trask (1991) Trends Genet. 7:149-154). Although current methods of FISH mapping favour use of large clones (several kb to several hundred kb; see Laan et al. (1995) Genome Res. 5:13-20), improvements in sensitivity may allow performance of FISH mapping using shorter probes.

[0246] A variety of nucleic acid amplification-based methods for genetic and physical mapping may be carried out using the nucleic acids. Examples include allele-specific amplification (Kazazian (1989) J. Lab. Clin. Med. 11:95-96), polymorphism of PCR-amplified fragments (CAPS; Sheffield et al. (1993) Genomics 16:325-332), allele-specific ligation (Landegren et al. (1988) Science 241:1077-1080), nucleotide extension reactions (Sokolov (1990) Nucleic Acid Res. 18:3671), Radiation Hybrid Mapping (Walter et al. (1997) Nat. Genet. 7:22-28) and Happy Mapping (Dear and Cook (1989) Nucleic Acid Res. 17:6795-6807). For these methods, the sequence of a nucleic acid is used to design and produce primer pairs for use in the amplification reaction or in primer extension reactions. The design of such primers is well known to those skilled in the art. In methods employing PCR-based genetic mapping, it may be necessary to identify DNA sequence differences between the parents of the mapping cross in the region corresponding to the instant nucleic acid sequence. This, however, is generally not necessary for mapping methods.

[0247] The methods according to the present invention result in plants having enhanced yield-related traits, as described hereinbefore. These traits may also be combined with other economically advantageous traits, such as further yield-enhancing traits, tolerance to other abiotic and biotic stresses, traits modifying various architectural features and/or biochemical and/or physiological features.

[0248] The term “table A” used in this specification is to be taken to specify the content of table A1, A2 and/or A3. The term “table A1” used in this specification is to be taken to specify the content of table A1. The term “table A2” used in this specification is to be taken to specify the content of table A2. The term “table A3” used in this specification is to be taken to specify the content of table A3.

[0249] In one preferred embodiment, the term “table A” means table A1. In one preferred embodiment, the term “table A” means table A2. In one preferred embodiment, the term “table A” means table A3.

[0250] In one embodiment the invention relates to subject matter summarized as follows:

[0251] Item 1. A method for enhancing yield-related traits in plants relative to control plants, comprising modulating expression in a plant of a nucleic acid encoding a phosphoenolpyruvate carboxylase (PEPC) protein.

[0252] Item 2. Method according to item 1, wherein said PEPC protein is SEQ ID NO: 2 and orthologues and paralogues thereof.

[0253] Item 3. Method according to item 1 or 2, wherein said PEPC protein has a C-terminal region having, in increasing order of preference, at least 70%, 75%, 80%, 85%, 90%, 95%, 96%, 97%, 98% or 99% or more sequence identity to the C-terminal region of the polypeptide represented by SEQ ID NO: 2.

[0254] Item 4. Method according to any preceding item, wherein said PEPC protein comprises any one or more of the following motifs:

Motif I: QEIMVGYSDSNKD, or a motif having, in increasing order of preference, at least 65% 70%, 75%, 80%, 85%, 90%, 95%, 96%, 97%, 98% or 99% to Motif I;
Motif II: FHGRGGSVGRGGGPAYKAIL, or a motif having, in increasing order of preference, at least 65% 70%, 75%, 80%, 85%, 90%, 95%, 96%, 97%, 98% or 99% to Motif II;
Motif III: LRAIPWVF, or a motif having, in increasing order of preference, at least 65% 70%, 75%, 80%, 85%, 90%, 95%, 96%, 97%, 98% or 99% to Motif III;
Motif IV: GIAAGMRNTG, or a motif having, in increasing order of preference, at least 65% 70%, 75%, 80%, 85%, 90%, 95%, 96%, 97%, 98% or 99% to Motif IV;
Motif V: SGFLSSNWE, or a motif having, in increasing order of preference, at least 65% 70%, 75%, 80%, 85%, 90%, 95%, 96%, 97%, 98% or 99% to Motif V;
Motif VI: SYKEWPEDKR, or a motif having, in increasing order of preference, at least 65% 70%, 75%, 80%, 85%, 90%, 95%, 96%, 97%, 98% or 99% to Motif VI.

[0255] Item 5. Method according to item 4, wherein
[0256] Motif I is preferably: QE V/I M I/L/V GYSDS G/N/S K D/F;
[0257] Motif II is preferably: FHGRGG T/S V/I GRGGGP T/S/A H/Y L/I/E/D/K AI L/Q/V;
[0258] Motif III is preferably: LRAIPW I/L/V F;
[0259] Motif IV is preferably: G I/V A/S AG L/M Q/R/K N T/S G;
[0260] Motif V is preferably: S/G G F/I L/T/V S/T S N/Q/G WE;
[0261] Motif VI is preferably: S/T Y S/L/K/A/R/Q E/K/D W S/P/T/D E E/D R/G/K/Q R/K.

[0262] Item 6. Method according to any preceding item, wherein said modulated expression is effected by introducing and expressing in a plant a nucleic acid encoding a PEPC polypeptide.

[0263] Item 7. Method according to any preceding item, wherein said nucleic acid encoding a PEPC polypeptide encodes any one of the proteins listed in Table A or is a portion of such a nucleic acid, or a nucleic acid capable of hybridising with such a nucleic acid.

[0264] Item 8. Method according to any preceding item, wherein said enhanced yield-related traits comprise one or more of the following, increased aboveground area, increased emergence vigour, increased total number of seeds, increased seed weight, increased fill rate, increased number of flowers per panicle, increased number of seeds, increased harvest index, increased height and an increase in the root thickness, each relative to control plants.

[0265] Item 9. Method according to any preceding item, wherein said enhanced yield-related traits are obtained under non-stress conditions and under mild drought conditions.

[0266] Item 9. Method according to any preceding item, wherein said enhanced yield-related traits are obtained under conditions of nitrogen deficiency.

[0267] Item 10. Method according to any preceding item, wherein said nucleic acid is operably linked to a young green tissue-specific promoter, preferably to a protochlorophyllid reductase promoter.

[0268] Item 11. Method according to any preceding item, wherein said nucleic acid encoding a PEPC polypeptide is of bacterial origin, preferably from Synechocystis.

[0269] Item 12. Plant or part thereof, including seeds, obtainable by a method according to any preceding item, wherein said plant or part thereof comprises a recombinant nucleic acid encoding a PEPC polypeptide.

[0270] Item 13. Construct comprising:
[0271] (i) nucleic acid encoding a PEPC polypeptide as defined in any one of items 1 to 5;
[0272] (ii) one or more control sequences capable of driving expression of the nucleic acid sequence of (a); and optionally
[0273] (iii) a transcription termination sequence.

[0274] Item 14. Construct according to item 13, wherein one of said control sequences is a young green tissue specific promoter, preferably a protochlorophyllid reductase promoter.

[0275] Item 15. Use of a construct according to item 13 or 14 in a method for making plants having one or more of the following: increased aboveground area, increased emergence vigour, increased total number of seeds, increased seed weight, increased fill rate, increased number of flowers per panicle, increased number of seeds, increased harvest index, increased height and an increase in the root thickness, each relative to control plants.

[0276] Item 16. Plant, plant part or plant cell transformed with a construct according to item 13 or 14.

[0277] Item 17. Method for the production of a transgenic plant having increased yield, particularly increased biomass and/or increased seed yield relative to control plants, comprising:
[0278] (i) introducing and expressing in a plant a nucleic acid encoding a PEPC polypeptide as defined in any one of items 1 to 5; and
[0279] (ii) cultivating the plant cell under conditions promoting plant growth and development.

[0280] Item 18. Transgenic plant having one or more of the following: increased aboveground area, increased emergence vigour, increased total number of seeds, increased seed weight, increased fill rate, increased number of flowers per panicle, increased number of seeds, increased harvest index, increased height and an increase in the root thickness, each relative to control plants, resulting from increased expression of a nucleic acid encoding a PEPC polypeptide as defined in any one of items 1 to 5, or a transgenic plant cell derived from said transgenic plant.

[0281] Item 19. Transgenic plant according to item 12, 16 or 18, or a transgenic plant cell derived thereof, wherein said plant is a crop plant or a monocot or a cereal, such as rice, maize, wheat, barley, millet, rye, triticale, sorghum and oats.

[0282] Item 20. Harvestable parts of a plant according to item 19, wherein said harvestable parts are preferably shoot biomass and/or seeds.

[0283] Item 21. Products derived from a plant according to item 19 and/or from harvestable parts of a plant according to item 20.

[0284] Item 22. Use of a nucleic acid encoding a PEPC polypeptide in increasing yield, particularly in increasing one or more of the following, increased aboveground area, increased emergence vigour, increased total number of seeds, increased seed weight, increased fill rate, increased number of flowers per panicle, increased number of seeds, increased harvest index, increased height and an increase in the root thickness, each relative to control plants.

[0285] In one embodiment the invention relates to subject matter summarized as follows:

[0286] Item 23. A method for enhancing yield-related traits in plants relative to control plants, comprising modulating expression in a plant of a nucleic acid encoding a class III U-box protein comprising a U-box domain in its N-terminal region.

[0287] Item 24. Method according to item 23, wherein said U-box domain has, in increasing order of preference, at least 50%, 55%, 60%, 65%, 70%, 75%, 80%, 85%, 90%, 95%, 96%, 97%, 98%, 99% or more sequence identity to the U-box domain of SEQ ID NO: 76 and/or comprises Motif VII: GI T/S YDR E/S/D/A N/S/G/A I E/A K/R/M W L/M/V/I F/L/A and/or Motif VIII: Q S/A/G W C/G/A I/R/A/T S/V/L/R/A H/N/R/N/V A/C/S.

[0288] Item 25. Method according to item 24, wherein said Motif VII is: GITYDRENIERWIF (SEQ ID NO: 77), or a motif having in increasing order of preference, at least 60%, 65%, 70%, 75%, 80%, 85%, 90%, 95%, 96%, 97%, 98%, 99% or more sequence identity to Motif VII; and

Motif VIII is: QSWCTLNA (SEQ ID NO: 78) or a motif having in increasing order of preference, at least 60%, 65%, 70%, 75%, 80%, 85%, 90%, 95%, 96%, 97%, 98%, 99% or more sequence identity to Motif VIII.

[0289] Item 26. Method according to any preceding item 23 to 25, wherein the Class III U-Box polypeptide comprises in its C-terminal region one or more of the following motifs:

### Motif IX: GR S/A/L A/E L/F L/V S/K/N/A H

### Motif X: G/A I/L/V A A/I/V V S/C/A/G/T K/C/R R/K/A A/I/V/T M/L/T R V/L/I S/P

### Motif XI: K/R L C/L F/V/M/L V/L/A V/L/A/I Q/R V/A/S D/S/G/E

### Motif XII: S/A/L YP

[0290] Item 27. Method according to item 26, wherein Motif IX is: GRAELLNH (SEQ ID NO: 79) or a motif having in increasing order of preference, at least 60%, 65%, 70%, 75%, 80%, 85%, 90%, 95%, 96%, 97%, 98%, 99% or more sequence identity to Motif IX;

Motif X is: GLAIVSKKILRVS (SEQ ID NO: 80) or a motif having in increasing order of preference, at least 60%, 65%, 70%, 75%, 80%, 85%, 90%, 95%, 96%, 97%, 98%, 99% or more sequence identity to Motif X;
Motif XI is: KLCLVLQVD (SEQ ID NO: 81) or a motif having in increasing order of preference, at least 60%, 65%, 70%, 75%, 80%, 85%, 90%, 95%, 96%, 97%, 98%, 99% or more sequence identity to Motif XI; and
Motif XII is: SYP (SEQ ID NO: 82) or a motif having in increasing order of preference, at least 60%, 65%, 70%, 75%, 80%, 85%, 90%, 95%, 96%, 97%, 98%, 99% or more sequence identity to Motif XII.

[0291] Item 28. Method according to any preceding item 23 to 27, wherein said modulated expression is effected by introducing and expressing in a plant a nucleic acid encoding a Class III U-box polypeptide.

[0292] Item 29. Method according to any preceding item 23 to 28, wherein said nucleic acid encoding a Class III U-box polypeptide encodes any one of the proteins listed in Table A2 or is a portion of such a nucleic acid, or a nucleic acid capable of hybridising with such a nucleic acid.

[0293] Item 30. Method according to any preceding item 23 to 29, wherein said nucleic acid sequence encodes an orthologue or paralogue of any of the proteins given in Table A2.

[0294] Item 31. Method according to any preceding item 23 to 30, wherein said enhanced yield-related traits comprise increased yield, preferably increased biomass and/or increased seed yield relative to control plants.

[0295] Item 32. Method according to any preceding item 23 to 31, wherein said enhanced yield-related traits are obtained under non-stress conditions and under mild drought conditions.

[0296] Item 33. Method according to any preceding item 23 to 32, wherein said enhanced yield-related traits are obtained under conditions of nitrogen deficiency.

[0297] Item 34. Method according to any preceding item 23 to 33, wherein said nucleic acid is operably linked to a young green tissue-specific promoter, preferably to a protochlorophyllid reductase promoter.

[0298] Item 35. Method according to any preceding item 23 to 34, wherein said nucleic acid encoding a Class III polypeptide is of plant origin, preferably from a dicotyledonous plant, further preferably from the family Solanaceae, more preferably from the genus Capsicum, most preferably from Capsicum annus.

[0299] Item 36. Plant or part thereof, including seeds, obtainable by a method according to any preceding item 23 to 35, wherein said plant or part thereof comprises a recombinant nucleic acid encoding a Class III U-box polypeptide.

[0300] Item 37. Construct comprising:
[0301] (iii) nucleic acid encoding a Class III U-box polypeptide as defined in item 23 to 27;
[0302] (iv) one or more control sequences capable of driving expression of the nucleic acid sequence of (a); and optionally
[0303] (v) a transcription termination sequence.

[0304] Item 38. Construct according to item 37, wherein one of said control sequences is a young green tissue specific promoter, preferably a protochlorophyllid reductase promoter.

[0305] Item 39. Use of a construct according to item 37 or 38 in a method for making plants having increased yield, particularly increased biomass and/or increased seed yield relative to control plants.

[0306] Item 40. Plant, plant part or plant cell transformed with a construct according to item 37 or 38.

[0307] Item 41. Method for the production of a transgenic plant having increased yield, particularly increased biomass and/or increased seed yield relative to control plants, comprising:
[0308] (d) introducing and expressing in a plant a nucleic acid encoding a Class III U-box polypeptide as defined in any one of item 23 to 27; and
[0309] (e) cultivating the plant cell under conditions promoting plant growth and development.

[0310] Item 42. Transgenic plant having increased yield, particularly increased biomass and/or increased seed yield, relative to control plants, resulting from increased expression of a nucleic acid encoding a Class III U-box polypeptide as defined in any one of item 23 to 27, or a transgenic plant cell derived from said transgenic plant.

[0311] Item 43. Transgenic plant according to item 36, 40 or 42, or a transgenic plant cell derived thereof, wherein said plant is a crop plant or a monocot or a cereal, such as rice, maize, wheat, barley, millet, rye, triticale, sorghum and oats.

[0312] Item 44. Harvestable parts of a plant according to item 43, wherein said harvestable parts are preferably shoot biomass and/or seeds.

[0313] Item 45. Products derived from a plant according to item 43 and/or from harvestable parts of a plant according to item 44.

[0314] Item 46. Use of a nucleic acid encoding a Class III U-box polypeptide in increasing yield, particularly in increasing seed yield and/or shoot biomass in plants, relative to control plants.

[0315] In one embodiment the invention relates to subject matter summarized as follows:

[0316] Item 47 A method for enhancing yield-related traits in plants relative to control plants, comprising modulating expression in a plant of a nucleic acid encoding a PQQC protein.

[0317] Item 48. Method according to item 47, wherein said PQQC protein has, in increasing order of preference, at least 45%, 50%, 55%, 60%, 65%, 70%, 75%, 80%, 85%, 90%, 95%, 96%, 97%, 98%, 99% or more sequence identity to the sequence represented by SEQ ID NO: 105.

[0318] Item 49. Method according to any preceding item 47 to 48, wherein said modulated expression is effected by introducing and expressing in a plant a nucleic acid encoding a PQQC polypeptide.

[0319] Item 50. Method according to any preceding item 47 to 49, wherein said nucleic acid encoding a PQQC polypeptide encodes any one of the proteins listed in Table A3 or is a portion of such a nucleic acid, or a nucleic acid capable of hybridising with such a nucleic acid.

[0320] Item 51. Method according to any preceding item 47 to 50, wherein said enhanced yield-related traits comprise increased yield, preferably increased biomass and/or increased seed yield relative to control plants.

[0321] Item 52. Method according to any preceding item 47 to 51, wherein said enhanced yield-related traits are obtained under non-stress conditions and under mild drought conditions.

[0322] Item 53. Method according to any preceding item 47 to 52, wherein said enhanced yield-related traits are obtained under conditions of nitrogen deficiency.

[0323] Item 54. Method according to any preceding item 47 to 53, wherein said nucleic acid is operably linked to a young green tissue-specific promoter, preferably to a protochlorophyllid reductase promoter.

[0324] Item 55. Method according to any preceding item 47 to 54, wherein said nucleic acid is operably linked to a constitutive promoter, preferably to a GOS2 promoter, most preferably to a GOS2 promoter from rice.

[0325] Item 56. Method according to any preceding item 47 to 55, wherein said nucleic acid encoding a PQQC polypeptide is of bacterial origin, preferably from pseudomonas.

[0326] Item 57. Plant or part thereof, including seeds, obtainable by a method according to any preceding claim, wherein said plant or part thereof comprises a recombinant nucleic acid encoding a PQQC polypeptide.

[0327] Item 58. Construct comprising:
[0328] nucleic acid encoding a PQQC polypeptide as defined in item 47 to 48;
[0329] one or more control sequences capable of driving expression of the nucleic acid sequence of (a); and optionally
[0330] a transcription termination sequence.

[0331] Item 59. Construct according to item 58, wherein one of said control sequences is a young green tissue specific promoter, preferably a protochlorophyllid reductase promoter.

[0332] Item 60. Construct according to item 58, wherein one of said control sequences is a constitutive promoter, preferably a GOS2 promoter, most a GOS2 promoter from rice.

[0333] Item 61. Use of a construct according to any one of item 58 to 60 in a method for making plants having increased yield, particularly increased biomass and/or increased seed yield relative to control plants.

[0334] Item 62. Plant, plant part or plant cell transformed with a construct according to any one of item 58 to 61.

[0335] Item 63. Method for the production of a transgenic plant having increased yield, particularly increased biomass and/or increased seed yield relative to control plants, comprising:
[0336] (i) introducing and expressing in a plant a nucleic acid encoding a PQQC polypeptide as defined in item 47 to 48; and
[0337] (ii) cultivating the plant cell under conditions promoting plant growth and development.

[0338] Item 64. Transgenic plant having increased yield, particularly increased biomass and/or increased seed yield, relative to control plants, resulting from increased expression of a nucleic acid encoding a PQQC polypeptide as defined in item 47 to 48, or a transgenic plant cell derived from said transgenic plant.

[0339] Item 65. Transgenic plant according to item 57, 62 or 64, or a transgenic plant cell derived thereof, wherein said plant is a crop plant or a monocot or a cereal, such as rice, maize, wheat, barley, millet, rye, triticale, sorghum and oats.

[0340] Item 66. Harvestable parts of a plant according to item 65, wherein said harvestable parts are preferably shoot biomass and/or seeds.

[0341] Item 67. Products derived from a plant according to item 65 and/or from harvestable parts of a plant according to item 66.

[0342] Item 68. Use of a nucleic acid encoding a PQQC polypeptide in increasing yield, particularly in increasing seed yield and/or shoot biomass in plants, relative to control plants.

### DESCRIPTION OF FIGURES

[0343] The present invention will now be described with reference to the following figures in which:

[0344] FIG. 1 shows Synechocystis PEPC protein with Motifs I to V highlighted.

[0345] FIG. 2 shows a multiple alignment of a selection of PEPC proteins.

[0346] FIG. 3 represents the expression vector for increased expression in Oryza sativa of a PEPC-encoding nucleic acid under the control of a protochlorophyllid reductase promoter.

[0347] FIG. 4 details examples of sequences useful in performing the methods according to the present invention.

[0348] FIG. 5 shows the amino acid sequence for a Class III U-box protein from Capsicum, Arabidopsis and rice in which the U-box domain has been indicated as well as conserved Motifs I to VI. The U-box domain is shown in bold; Motif I in bold italic, Motif II is boxed, Motif III is underlined, Motif IV is italic and underlined, Motif V is double-underlined and Motif VI is broken-underlined.

[0349] FIG. 6 shows a multiple alignment of a selection of Class III U-box proteins.

[0350] FIG. 7 represents the binary vector for increased expression in Oryza sativa of a Class III U-box-encoding nucleic acid under the control of a protochlorophyllid reductase promoter.

[0351] FIG. 8 details examples of sequences useful in performing the methods according to the present invention.

[0352] FIG. 9 shows a multiple alignment of a selection of PQQC proteins.

[0353] FIG. 10 represents the binary vector for increased expression in Oryza sativa of a PQQC-encoding nucleic acid under the control of a protochlorophyllid reductase promoter.

[0354] FIG. 11 details examples of sequences useful in performing the methods according to the present invention.

### EXAMPLES

[0355] The present invention will now be described with reference to the following examples, which are by way of illustration alone. The following examples are not intended to completely define or otherwise limit the scope of the invention.

[0356] DNA manipulation: unless otherwise stated, recombinant DNA techniques are performed according to standard protocols described in (Sambrook (2001) Molecular Cloning: a laboratory manual, 3rd Edition Cold Spring Harbor Laboratory Press, CSH, New York) or in Volumes 1 and 2 of Ausubel et al. (1994), Current Protocols in Molecular Biology, Current Protocols. Standard materials and methods for plant molecular work are described in Plant Molecular Biology Labfax (1993) by R. D. D. Croy, published by BIOS Scientific Publications Ltd (UK) and Blackwell Scientific Publications (UK).

### Example 1

### Identification of Sequences Related to the Nucleic Acid Sequence Used in the Methods of the Invention

[0357] Sequences (full length cDNA, ESTs or genomic) related to the nucleic acid sequence used in the methods of the present invention were identified amongst those maintained in the Entrez Nucleotides database at the National Center for Biotechnology Information (NCBI) using database sequence search tools, such as the Basic Local Alignment Tool (BLAST) (Altschul et al. (1990) J. Mol. Biol. 215:403-410; and Altschul et al. (1997) Nucleic Acids Res. 25:3389-3402). The program is used to find regions of local similarity between sequences by comparing nucleic acid or polypeptide sequences to sequence databases and by calculating the statistical significance of matches. For example, the polypeptide encoded by the nucleic acid used in the present invention was used for the TBLASTN algorithm, with default settings and the filter to ignore low complexity sequences set off. The output of the analysis was viewed by pairwise comparison, and ranked according to the probability score (E-value), where the score reflect the probability that a particular alignment occurs by chance (the lower the E-value, the more significant the hit). In addition to E-values, comparisons were also scored by percentage identity. Percentage identity refers to the number of identical nucleotides (or amino acids) between the two compared nucleic acid (or polypeptide) sequences over a particular length. In some instances, the default parameters may be adjusted to modify the stringency of the search. For example the E-value may be increased to show less stringent matches. This way, short nearly exact matches may be identified.

[0358] Table A provides a list of nucleic acid sequences related to the nucleic acid sequence used in the methods of the present invention.

Table A1
Examples of PEPC polypeptides:

| Source | Nucleic acid SEQ ID NO: | Protein SEQ ID NO: |
|---|---|---|
| see FIG. 4 | see FIG. 4 | see FIG. 4 |

TABLE A2
Examples of Class III U-box polypeptides:

| | Nucleic acid | Protein |
|---|---|---|
| Plant Source | SEQ ID NO: | SEQ ID NO: |
| Capsicum annuum | 74 | 75 |
| Arabidopsis thaliana | 83 | 84 |
| Arabidopsis thaliana | 85 | 86 |
| Medicago truncatula | 87 | 88 |
| Nicotiana benthamiana | 89 | 90 |
| Oryza sativa | 91 | 92 |
| Oryza sativa | 93 | 94 |
| Oryza sativa | 95 | 96 |
| Oryza sativa | 97 | 98 |
| Oryza sativa | 99 | 100 |

TABLE A3
Examples of PQQC polypeptides:

| Source | Nucleic acid SEQ ID NO: | Protein SEQ ID NO: |
|---|---|---|
| see FIG. 11 | see FIG. 11 | see FIG. 11 |

[0359] In some instances, related sequences have tentatively been assembled and publicly disclosed by research institutions, such as The Institute for Genomic Research (TIGR). The Eukaryotic Gene Orthologs (EGO) database may be used to identify such related sequences, either by keyword search or by using the BLAST algorithm with the nucleic acid or polypeptide sequence of interest.

[0360] Given below is the output of a BLASTP showing further PEPC sequences related to SEQ ID NO: 2 and therefore useful in the methods of the invention.

### 1: NP_{—}441713

[0361] phosphoenolpyruvate carboxylase [Synechocystis sp. PCC 6803]
gi|16330985|ref|NP_{—}441713.1|[16330985]

### 2: ZP_{—}01729388

[0362] phosphoenolpyruvate carboxylase [Cyanothece sp. CCY0110]
gi|126658238|ref|ZP_{—}01729388.1|[126658238]

### 3: ZP_{—}00517310

[0363] Phosphoenolpyruvate carboxylase [Crocosphaera watsonii WH 8501]
gi|67923850|ref|ZP_{—}00517310.1|[67923850]

### 4: ZP_{—}00108354

[0364] COG2352: Phosphoenolpyruvate carboxylase [Nostoc punctiforme PCC 73102]
gi|23126460|ref|ZP_{—}00108354.1|[23126460]

### 5: ZP_{—}01631340

[0365] phosphoenolpyruvate carboxylase [Nodularia spumigena CCY9414]
gi|119512252|ref|ZP_{—}01631340.1|[119512252]

### 6: YP_{—}322649

[0366] phosphoenolpyruvate carboxylase [Anabaena variabilis ATCC 29413]
gi|75908353|ref|YP_{—}322649.1|[75908353]

### 7: AAV90837

[0367] phosphoenolpyruvate carboxylase [Synechococcus sp. PCC 7002]
gi|56417897|gb|AAV90837.1|[56417897]

### 8: ZP_{—}01620914

[0368] Phosphoenolpyruvate carboxylase [Lyngbya sp. PCC 8106]
gi|119487042|ref|ZP_{—}01620914.1|[119487042]

### 9: P28594

[0369] Phosphoenolpyruvate carboxylase (PEPCase) (PEPC)
gi|25014052|sp|P28594|CAPP_ANASP[25014052]

### 10: YP_{—}172556

[0370] phosphoenolpyruvate carboxylase [Synechococcus elongatus PCC 6301]
gi|56751855|ref|YP_{—}172556.1|[56751855]

### 11: YP_{—}401269

[0371] Phosphoenolpyruvate carboxylase [Synechococcus elongatus PCC 7942]
gi|81301061|ref|YP_{—}401269.1|[81301061]

### 12: YP_{—}720722

[0372] Phosphoenolpyruvate carboxylase [Trichodesmium erythraeum IMS101]
gi|113474661|ref|YP_{—}720722.1|[113474661]

### 13: NP_{—}682702

[0373] phosphoenolpyruvate carboxylase [Thermosynechococcus elongatus BP-1]
gi|22299455|ref|NP_{—}682702.1|[22299455]

### 14: NP_{—}488901

[0374] phosphoenolpyruvate carboxylase [Nostoc sp. PCC 7120]
gi|17232353|ref|NP_{—}488901.1|[17232353]

### 15: YP_{—}478060

[0375] phosphoenolpyruvate carboxylase [Synechococcus sp. JA-2-3B′a(2-13)]
gi|86609298|ref|YP_{—}478060.1|[86609298]

### 16: ZP_{—}01083776

[0376] phosphoenolpyruvate carboxylase [Synechococcus sp. WH 5701]
gi|87300934|ref|ZP_{—}01083776.1|[87300934]

### 17: ZP_{—}01080788

[0377] Phosphoenolpyruvate carboxylase [Synechococcus sp. RS9917]
gi|87124941|ref|ZP_{—}01080788.1|[87124941]

### 18: YP_{—}474305

[0378] phosphoenolpyruvate carboxylase [Synechococcus sp. JA-3-3Ab]
gi|86605542|ref|YP_{—}474305.1|[86605542]

### 19: ZP_{—}01469854

[0379] phosphoenolpyruvate carboxylase [Synechococcus sp. BL107]
gi|116072588|ref|ZP_{—}01469854.1|[116072588]

### 20: NP_{—}876121

[0380] phosphoenolpyruvate carboxylase [Prochlorococcus marinus subsp. marinus str. CCMP1375]
gi|33241179|ref|NP_{—}876121.1|[33241179]

### 21: ZP_{—}01473048

[0381] phosphoenolpyruvate carboxylase [Synechococcus sp. RS9916]
gi|116075789|ref|ZP_{—}01473048.1|[116075789]

### 22: ZP_{—}01006468

[0382] phosphoenolpyruvate carboxylase [Prochlorococcus marinus str. MIT 9211]
gi|84519119|ref|ZP_{—}01006468.1|[84519119]

### 23: ABE11140

[0383] phosphoenolpyruvate carboxylase [uncultured Prochlorococcus marinus clone HF10-11H11]
gi|91070220|gb|ABE11140.1|[91070220]

### 24: YP_{—}001091990

[0384] Phosphoenolpyruvate carboxylase [Prochlorococcus marinus str. MIT 9301]
gi|126697104|ref|YP_{—}001091990.1|[126697104]

### 25: YP_{—}377934

[0385] phosphoenolpyruvate carboxylase [Synechococcus sp. CC9902]
gi|78185499|ref|YP_{—}377934.1|[78185499]

### 26: YP_{—}398164

[0386] Phosphoenolpyruvate carboxylase [Prochlorococcus marinus str. MIT 9312]
gi|78780052|ref|YP_{—}398164.1|[78780052]

### 27: YP_{—}292340

[0387] phosphoenolpyruvate carboxylase [Prochlorococcus marinus str. NATL2A]
gi|72382985|ref|YP_{—}292340.1|[72382985]

### 28: YP_{—}001010172

[0388] Phosphoenolpyruvate carboxylase [Prochlorococcus marinus str. AS9601]
gi|123969314|ref|YP_{—}001010172.1|[123969314]

### 29: NP_{—}895540

[0389] phosphoenolpyruvate carboxylase [Prochlorococcus marinus str. MIT 9313]
gi|33863980|ref|NP_{—}895540.1|[33863980]

### 30: YP_{—}001015841

[0390] Phosphoenolpyruvate carboxylase [Prochlorococcus marinus str. NATL1A]
gi|124026726|ref|YP_{—}001015841.1|[124026726]

### 31: YP_{—}001018274

[0391] Phosphoenolpyruvate carboxylase [Prochlorococcus marinus str. MIT 9303]
gi|124023967|ref|YP_{—}001018274.1|[124023967]

### 32: ZP_{—}01123374

[0392] phosphoenolpyruvate carboxylase [Synechococcus sp. WH 7805]
gi|88807863|ref|ZP_{—}01123374.1|[88807863]

### 33: YP_{—}001224177

[0393] Phosphoenolpyruvate carboxylase [Synechococcus sp. WH 7803]
gi|148238790|ref|YP_{—}001224177.1|[148238790]

### 34: NP_{—}898138

[0394] phosphoenolpyruvate carboxylase [Synechococcus sp. WH 8102]
gi|33866579|ref|NP_{—}898138.1|[33866579]

### 35: YP_{—}380727

[0395] phosphoenolpyruvate carboxylase [Synechococcus sp. CC9605]
gi|78211948|ref|YP_{—}380727.1|[78211948]

### 36: NP_{—}893692

[0396] phosphoenolpyruvate carboxylase [Prochlorococcus marinus subsp. pastoris str. CCMP1986]
gi|33862131|ref|NP_{—}893692.1|[33862131]

### 37: YP_{—}001012076

[0397] Phosphoenolpyruvate carboxylase [Prochlorococcus marinus str. MIT 9515]
gi|123966995|ref|YP_{—}001012076.1|[123966995]

### 38: YP_{—}001228346

[0398] Phosphoenolpyruvate carboxylase [Synechococcus sp. RCC307]
gi|148243189|ref|YP_{—}001228346.1|[148243189]

### 39: YP_{—}729688

[0399] phosphoenolpyruvate carboxylase [Synechococcus sp. CC9311]
gi|113954224|ref|YP_{—}729688.1|[113954224]

### 40: NP_{—}923360

[0400] phosphoenolpyruvate carboxylase [Gloeobacter violaceus PCC 7421]
gi|37519983|ref|NP_{—}923360.1|[37519983]

### 41: ZP_{—}01424999

[0401] Phosphoenolpyruvate carboxylase [Herpetosiphon aurantiacus ATCC 23779]
gi|113939140|ref|ZP_{—}01424999.1|[113939140]

### 42: YP_{—}830113

[0402] Phosphoenolpyruvate carboxylase [Arthrobacter sp. FB24]
gi|116669180|ref|YP_{—}830113.1|[116669180]

### 43: YP_{—}946565

[0403] phosphoenolpyruvate carboxylase [Arthrobacter aurescens TC1]
gi|119962288|ref|YP_{—}946565.1|[119962288]

### 44: ZP_{—}01696337

[0404] phosphoenolpyruvate carboxylase [Bacillus coagulans 36D1]
gi|124521401|ref|ZP_{—}01696337.1|[124521401]

### 45: YP_{—}342813

[0405] Phosphoenolpyruvate carboxylase [Nitrosococcus oceani ATCC 19707]
gi|77164288|ref|YP_{—}342813.1|[77164288]

### 46: NP_{—}627344

[0406] phosphoenolpyruvate carboxylase [Streptomyces coelicolor A3(2)]
gi|21221565|ref|NP_{—}627344.1|[21221565]

### 47: AAY89988

[0407] predicted PEP carboxylase [uncultured bacterium BAC13K9BAC]
gi|68304977|gb|AAY89988.1|[68304977]

### 48: NP_{—}824743

[0408] phosphoenolpyruvate carboxylase [Streptomyces avermitilis MA-4680]
gi|29830109|ref|NP_{—}824743.1|[29830109]

### 49: ZP_{—}01649489

[0409] Phosphoenolpyruvate carboxylase [Salinispora arenicola CNS205]
gi|119883229|ref|ZP_{—}01649489.1|[119883229]

### 50: ZP_{—}00568542

[0410] Phosphoenolpyruvate carboxylase [Frankia sp. EAN1pec]
gi|68229346|ref|ZP_{—}00568542.1|[68229346]

### 51: YP_{—}001363100

[0411] Phosphoenolpyruvate carboxylase [Kineococcus radiotolerans SRS30216]
gi|152967316|ref|YP_{—}001363100.1|[152967316]

### 52: YP_{—}001157738

[0412] Phosphoenolpyruvate carboxylase [Salinispora tropica CNB-440]
gi|145593441|ref|YP_{—}001157738.1|[145593441]

### 53: YP_{—}318884

[0413] phosphoenolpyruvate carboxylase [Nitrobacter winogradskyi Nb-255]
gi|75676463|ref|YP_{—}318884.1|[75676463]

### 54: YP_{—}294925

[0414] phosphoenolpyruvate carboxylase [Ralstonia eutropha JMP134]
gi|73540405|ref|YP_{—}294925.1|[73540405]

### 55: YP_{—}577930

[0415] Phosphoenolpyruvate carboxylase [Nitrobacter hamburgensis X14]
gi|92118201|ref|YP_{—}577930.1|[92118201]

### 56: ZP_{—}02010108

[0416] Phosphoenolpyruvate carboxylase [Ralstonia pickettii 12D]
gi|153888973|ref|ZP_{—}02010108.1|[153888973]

### 57: NP_{—}840673

[0417] Phosphoenolpyruvate carboxylase [Nitrosomonas europaea ATCC 19718]
gi|30248603|ref|NP_{—}840673.1|[30248603]

### 58: NP_{—}947117

[0418] phosphoenolpyruvate carboxylase [Rhodopseudomonas palustris CGA009]
gi|39934841|ref|NP_{—}947117.1|[39934841]

### 59: YP_{—}391787

[0419] Phosphoenolpyruvate carboxylase [Thiomicrospira crunogena XCL-2]
gi|78485862|ref|YP_{—}391787.1|[78485862]

### 60: ZP_{—}01661147

[0420] Phosphoenolpyruvate carboxylase [Ralstonia pickettii 12J]
gi|121528533|ref|ZP_{—}01661147.1|[121528533]

### 61: YP_{—}001204637

[0421] phosphoenolpyruvate carboxylase [Bradyrhizobium sp. ORS278]
gi|146339589|ref|YP_{—}001204637.1|[146339589]

### 62: YP_{—}932496

[0422] probable phosphoenolpyruvate carboxylase [Azoarcus sp. BH72]
gi|119897283|ref|YP_{—}932496.1|[119897283]

### 63: YP_{—}970358

[0423] Phosphoenolpyruvate carboxylase [Acidovorax avenae subsp. citrulli AAC00-1]
gi|120610680|ref|YP_{—}970358.1|[120610680]

### 64: ZP_{—}01047635

[0424] phosphoenolpyruvate carboxylase [Nitrobacter sp. Nb-311A]
gi|85716666|ref|ZP_{—}01047635.1|[85716666]

### 65: YP_{—}369991

[0425] phosphoenolpyruvate carboxylase [Burkholderia sp. 383]
gi|78067222|ref|YP_{—}369991.1|[78067222]

### 66: YP_{—}314388

[0426] phosphoenolpyruvate carboxylase [Thiobacillus denitrificans ATCC 25259]
gi|74316648|ref|YP_{—}314388.1|[74316648]

### 67: NP_{—}520479

[0427] phosphoenolpyruvate carboxylase [Ralstonia solanacearum GMI1000]
gi|17547077|ref|NP_{—}520479.1|[17547077]

### 68: YP_{—}727365

[0428] phosphoenolpyruvate carboxylase [Ralstonia eutropha H16]
gi|113868876|ref|YP_{—}727365.1|[113868876]

### 69: YP_{—}001238961

[0429] phosphoenolpyruvate carboxylase [Bradyrhizobium sp. BTAi1]
gi|148254376|ref|YP_{—}001238961.1|[148254376]

### 70: YP_{—}001415233

[0430] Phosphoenolpyruvate carboxylase [Xanthobacter autotrophicus Py2]
gi|154244275|ref|YP_{—}001415233.1|[154244275]

### 71: YP_{—}487198

[0431] Phosphoenolpyruvate carboxylase [Rhodopseudomonas palustris HaA2]
gi|86750702|ref|YP_{—}487198.1|[86750702]

### 72: NP_{—}769595

[0432] phosphoenolpyruvate carboxylase [Bradyrhizobium japonicum USDA 110]
gi|27378066|ref|NP_{—}769595.1|[27378066]

### 73: YP_{—}569012

[0433] Phosphoenolpyruvate carboxylase [Rhodopseudomonas palustris BisB5]
gi|91976353|ref|YP_{—}569012.1|[91976353]

### 74: ZP_{—}00946208

[0434] Phosphoenolpyruvate carboxylase [Ralstonia solanacearum UW551]
gi|83749206|ref|ZP_{—}00946208.1|[83749206]

### 75: YP_{—}780719

[0435] Phosphoenolpyruvate carboxylase [Rhodopseudomonas palustris BisA53]
gi|115523808|ref|YP_{—}780719.1|[115523808]

### 76: BAA21835

[0436] phosphoenolpyruvate carboxylase [Rhodopseudomonas palustris]
gi|2339975|dbj|BAA21835.1|[2339975]

### 77: Q59757

[0437] Phosphoenolpyruvate carboxylase (PEPCase) (PEPC)
gi|2499464|sp|Q59757|CAPP_RHOMR[2499464]

### 78: YP_{—}747257

[0438] Phosphoenolpyruvate carboxylase [Nitrosomonas eutropha C91]
gi|114331035|ref|YP_{—}747257.1|[114331035]

### 79: ZP_{—}01554849

[0439] Phosphoenolpyruvate carboxylase [Burkholderia ambifaria MC40-6]
gi|118696768|ref|ZP_{—}01554849.1|[118696768]

### 80: YP_{—}774359

[0440] Phosphoenolpyruvate carboxylase [Burkholderia cepacia AMMD]
gi|115352520|ref|YP_{—}774359.1|[115352520]

### 81: EAY68193

[0441] Phosphoenolpyruvate carboxylase [Burkholderia dolosa AU0158]
gi|124894313|gb|EAY68193.1|[124894313]

### 82: YP_{—}621690

[0442] Phosphoenolpyruvate carboxylase [Burkholderia cenocepacia AU 1054]
gi|107023363|ref|YP_{—}621690.1|[107023363]

### 83: YP_{—}836069

[0443] Phosphoenolpyruvate carboxylase [Burkholderia cenocepacia HI2424]
gi|116690446|ref|YP_{—}836069.1|[116690446]

### 84: ZP_{—}00987174

[0444] COG2352: Phosphoenolpyruvate carboxylase [Burkholderia dolosa AU0158]
gi|84362555|ref|ZP_{—}00987174.1|[84362555]

### 85: ZP_{—}01559873

[0445] Phosphoenolpyruvate carboxylase [Burkholderia cenocepacia MC0-3]
gi|118707287|ref|ZP_{—}01559873.1|[118707287]

### 86: YP_{—}584892

[0446] phosphoenolpyruvate carboxylase [Ralstonia metallidurans CH34]
gi|94311682|ref|YP_{—}584892.1|[94311682]

### 87: YP_{—}987106

[0447] Phosphoenolpyruvate carboxylase [Acidovorax sp. JS42]
gi|121595210|ref|YP_{—}987106.1|[121595210]

### 88: ZP_{—}00980295

[0448] COG2352: Phosphoenolpyruvate carboxylase [Burkholderia cenocepacia PC184]
gi|84355411|ref|ZP_{—}00980295.1|[84355411]

### 89: EAY64002

[0449] Phosphoenolpyruvate carboxylase [Burkholderia cenocepacia PC184]
gi|124872286|gb|EAY64002.1|[124872286]

### 90: YP_{—}531562

[0450] Phosphoenolpyruvate carboxylase [Rhodopseudomonas palustris BisB18]
gi|90423192|ref|YP_{—}531562.1|[90423192]

### 91: YP_{—}710875

[0451] Phosphoenolpyruvate carboxylase (PEPCase) (PEPC) [Frankia alni ACN14a]
gi|111220081|ref|YP_{—}710875.1|[111220081]

### 92: ZP_{—}01325009

[0452] hypothetical protein BpseP_{—}03001239 [Burkholderia pseudomallei Pasteur]
gi|100063478|ref|ZP_{—}01325009.1|[100063478]

### 93: YP_{—}995835

[0453] Phosphoenolpyruvate carboxylase [Verminephrobacter eiseniae EF01-2]
gi|121608028|ref|YP_{—}995835.1|[121608028]

### 94: CAM76812

[0454] Phosphoenolpyruvate carboxylase [Magnetospirillum gryphiswaldense MSR-1]
gi|144899948|emb|CAM76812.1|[144899948]

### 95: ZP_{—}01317342

[0455] hypothetical protein Bpse1_{—}03003262 [Burkholderia pseudomallei 1655]
gi|99910315|ref|ZP_{—}01317342.1|[99910315]

### 96: ZP_{—}01213561

[0456] hypothetical protein Bpse17_{—}02001265 [Burkholderia pseudomallei 1710a]
gi|90293964|ref|ZP_{—}01213561.1|[90293964]

### 97: YP_{—}001065355

[0457] phosphoenolpyruvate carboxylase [Burkholderia pseudomallei 1106a]
gi|126451534|ref|YP_{—}001065355.1|[126451534]

### 98: YP_{—}107641

[0458] phosphoenolpyruvate carboxylase [Burkholderia pseudomallei K96243]
gi|53718655|ref|YP_{—}107641.1|[53718655]

### 99: YP_{—}707103

[0459] phosphoenolpyruvate carboxylase [Rhodococcus sp. RHA1]
gi|111024131|ref|YP_{—}707103.1|[111024131]

### 100: YP_{—}001058119

[0460] phosphoenolpyruvate carboxylase [Burkholderia pseudomallei 668]
gi|126440608|ref|YP_{—}001058119.1|[126440608]

### Example 2

### Alignment of PEPC Polypeptide Sequences

[0461] Alignment of polypeptide sequences was performed using the AlignX programme from the Vector NTI (Invitrogen) which is based on the popular Clustal W algorithm of progressive alignment (Thompson et al. (1997) Nucleic Acids Res 25:4876-4882; Chema et al. (2003). Nucleic Acids Res 31:3497-3500). Default values are for the gap open penalty of 10, for the gap extension penalty of 0.1 and the selected weight matrix is Blosum 62 (if polypeptides are aligned). Minor manual editing was done to further optimise the alignment. See FIG. 2 for the alignment.

### Example 3

### Calculation of Global Percentage Identity Between Polypeptide Sequences Useful in Performing the Methods of the Invention

[0462] Global percentages of similarity and identity between full length polypeptide sequences useful in performing the methods of the invention is determined using one of the methods available in the art, the MatGAT (Matrix Global Alignment Tool) software (BMC Bioinformatics. 2003 4:29. MatGAT: an application that generates similarity/identity matrices using protein or DNA sequences. Campanella J J, Bitincka L, Smalley J; software hosted by Ledion Bitincka). MatGAT software generates similarity/identity matrices for DNA or protein sequences without needing pre-alignment of the data. The program performs a series of pair-wise alignments using the Myers and Miller global alignment algorithm (with a gap opening penalty of 12, and a gap extension penalty of 2), calculates similarity and identity using for example Blosum 62 (for polypeptides), and then places the results in a distance matrix. Sequence similarity is shown in the bottom half of the dividing line and sequence identity is shown in the top half of the diagonal dividing line.

[0463] Parameters used in the comparison are:

| Scoring matrix: | Blosum62 |
|---|---|
| First Gap: | 12 |
| Extending gap: | 2 |

### Example 4

### Identification of Domains Comprised in Polypeptide Sequences Useful in Performing the Methods of the Invention

[0464] The Integrated Resource of Protein Families, Domains and Sites (InterPro) database is an integrated interface for the commonly used signature databases for text- and sequence-based searches. The InterPro database combines these databases, which use different methodologies and varying degrees of biological information about well-characterized proteins to derive protein signatures. Collaborating databases include SWISS-PROT, PROSITE, TrEMBL, PRINTS, ProDom and Pfam, Smart and TIGRFAMs. Pfam is a large collection of multiple sequence alignments and hidden Markov models covering many common protein domains and families. Pfam is hosted at the Sanger Institute server in the United Kingdom. Interpro is hosted at the European Bioinformatics Institute in the United Kingdom.

[0465] The results for a PEPC polypeptide gave an INTERPRO domain: IPR001449 (phosphoenolpyruvate carboxylase) and PFAM: 00311.

[0466] The results of the InterPro scan of the polypeptide sequence as represented by SEQ ID NO: 75 are given below.

### SMART: 00504

### InterPro: IPR003613 and IPR008938

### Example 5

### Topology Prediction of the Polypeptide Sequences Useful in Performing the Methods of the Invention

[0467] TargetP 1.1 predicts the subcellular location of eukaryotic proteins. The location assignment is based on the predicted presence of any of the N-terminal pre-sequences: chloroplast transit peptide (cTP), mitochondrial targeting peptide (mTP) or secretory pathway signal peptide (SP). Scores on which the final prediction is based are not really probabilities, and they do not necessarily add to one. However, the location with the highest score is the most likely according to TargetP, and the relationship between the scores (the reliability class) may be an indication of how certain the prediction is. The reliability class (RC) ranges from 1 to 5, where 1 indicates the strongest prediction. TargetP is maintained at the server of the Technical University of Denmark.

[0468] For the sequences predicted to contain an N-terminal presequence a potential cleavage site can also be predicted.

[0469] A number of parameters are selected: the “plant” organism group is selected, no cutoffs defined, and the predicted length of the transit peptide requested.

[0470] Many other algorithms can be used to perform such analyses, including:
[0471] ChloroP 1.1 hosted on the server of the Technical University of Denmark;
[0472] Protein Prowler Subcellular Localisation Predictor version 1.2 hosted on the server of the Institute for Molecular Bioscience, University of Queensland, Brisbane, Australia;
[0473] PENCE Proteome Analyst PA-GOSUB 2.5 hosted on the server of the University of Alberta, Edmonton, Alberta, Canada;
[0474] TMHMM, hosted on the server of the Technical University of Denmark

### Example 6

### Functional Assay for the Polypeptide of the Invention

[0475] PEPC is that it catalyzes the addition of CO₂ to phosphoenolpyruvate (PEP) to form the four-carbon compound oxaloacetate:

PEP+CO₂→oxaloacetate+Pi

[0476] For a description of the measurement of PEPC activity, see Chen et al., 2002 (Plant Cell Physiol 43(2): 159-169); and Chen et al., 2004 (Planta 219 pp 440-449).

[0477] The Class III U-box polypeptide exhibits E3 ubiquitin ligase activity.

[0478] PQQC catalyses the last step in PQQ biosynthesis

### Example 7

### Cloning of the Nucleic Acid Sequence Used in the Methods of the Invention

[0479] The nucleic acid sequence encoding a PEPC polypeptide and used in the methods of the invention was amplified by PCR Hifi Taq DNA polymerase in standard conditions, using 200 ng of template in a 50 μl PCR mix. The primers used were prm08777 (SEQ ID NO: 72; sense, start codon in bold):

5-ggggacaagtttgtacaaaaaagcaggcttaaacaatgaactt
ggcagttcct-3′
and
prm08782 (SEQ ID NO: 73; reverse, complementary):
5′-ggggaccactttgtacaagaaagctgggttcaaccagtatt
acgcatt-3′,

which include the AttB sites for Gateway recombination. The amplified PCR fragment was purified also using standard methods. The first step of the Gateway procedure, the BP reaction, was then performed, during which the PCR fragment recombines in vivo with the pDONR201 plasmid to produce, according to the Gateway terminology, an “entry clone”, pPEPC. Plasmid pDONR201 was purchased from Invitrogen, as part of the Gateway® technology.

[0480] The entry clone comprising SEQ ID NO: 1 was then used in an LR reaction with a destination vector used for Oryza sativa transformation. This vector contained as functional elements within the T-DNA borders: a plant selectable marker; a screenable marker expression cassette; and a Gateway cassette intended for LR in vivo recombination with the nucleic acid sequence of interest already cloned in the entry clone. A protochlorophyllid reductase promoter (SEQ ID NO: 71) for young green tissue specific expression was located upstream of this Gateway cassette—see FIG. 3.

[0481] After the LR recombination step, the resulting expression vector pPCPR::PEPC (FIG. 3) was transformed into Agrobacterium strain LBA4044 according to methods well known in the art.

[0482] The nucleic acid sequence encoding a Class III U-Box protein and used in the methods of the invention was amplified by PCR Hifi Taq DNA polymerase in standard conditions, using 200 ng of template in a 50 μl PCR mix. The primers used were prm9075 (SEQ ID NO: 102; sense, start codon in bold):

5′-ggggacaagtttgtacaaaaaagcaggcttaaacaatggaagaa
attcaagtacc-3′
and
prm8785 (SEQ ID NO: 103; reverse, complementary):
5′-ggggaccactttgtacaagaaagctgggtgctcttttggtccta
ttttcct-3′,

which include the AttB sites for Gateway recombination. The amplified PCR fragment was purified also using standard methods. The first step of the Gateway procedure, the BP reaction, was then performed, during which the PCR fragment recombines in vivo with the pDONR201 plasmid to produce, according to the Gateway terminology, an “entry clone”, pU-box. Plasmid pDONR201 was purchased from Invitrogen, as part of the Gateway® technology.

[0483] The entry clone comprising SEQ ID NO: 74 was then used in an LR reaction with a destination vector used for Oryza sativa transformation. This vector contained as functional elements within the T-DNA borders: a plant selectable marker; a screenable marker expression cassette; and a Gateway cassette intended for LR in vivo recombination with the nucleic acid sequence of interest already cloned in the entry clone. A protochlorophyllid reductase promoter (SEQ ID NO: 101) for young green tissue specific expression was located upstream of this Gateway cassette.

[0484] After the LR recombination step, the resulting expression vector pPCPR::U-BOX (FIG. 7) was transformed into Agrobacterium strain LBA4044 according to methods well known in the art.

[0485] The nucleic acid sequence encoding a PQQC protein and used in the methods of the invention was amplified by PCR Hifi Taq DNA polymerase in standard conditions, using 200 ng of template in a 50 μl PCR mix. The primers used were prm08777 (SEQ ID NO: 228; sense, start codon in bold):

5-ggggacaagtttgtacaaaaaagcaggcttaaacaatgactga
caccccaatgtc-3′
and
prm08782 (SEQ ID NO: 229; reverse, complementary):
5′-ggggaccactttgtacaagaaagctgggttcataaggtga
ttcctttatgc-3′,

which include the AttB sites for Gateway recombination. The amplified PCR fragment was purified also using standard methods. The first step of the Gateway procedure, the BP reaction, was then performed, during which the PCR fragment recombines in vivo with the pDONR201 plasmid to produce, according to the Gateway terminology, an “entry clone”, pPQQC. Plasmid pDONR201 was purchased from Invitrogen, as part of the Gateway® technology.

[0486] The entry clone comprising SEQ ID NO: 104 was then used in an LR reaction with a destination vector used for Oryza sativa transformation. This vector contained as functional elements within the T-DNA borders: a plant selectable marker; a screenable marker expression cassette; and a Gateway cassette intended for LR in vivo recombination with the nucleic acid sequence of interest already cloned in the entry clone. A protochlorophyllid reductase promoter (SEQ ID NO: 226) for young green tissue specific expression was located upstream of this Gateway cassette or a GOS2 promoter (SEQ ID NO 227)—see FIG. 9.

[0487] After the LR recombination step, the resulting expression vector pGOS2::PQQC (FIG. 9B) was transformed into Agrobacterium strain LBA4044 according to methods well known in the art.

[0488] After the LR recombination step, the resulting expression vector pPCPR::PQQC (FIG. 9A) was transformed into Agrobacterium strain LBA4044 according to methods well known in the art.

### Example 8

### Plant Transformation

### Rice Transformation

[0489] The Agrobacterium containing the expression vector was used to transform Oryza sativa plants. Mature dry seeds of the rice japonica cultivar Nipponbare were dehusked. Sterilization was carried out by incubating for one minute in 70% ethanol, followed by 30 minutes in 0.2% HgCl₂, followed by a 6 times 15 minutes wash with sterile distilled water. The sterile seeds were then germinated on a medium containing 2,4-D (callus induction medium). After incubation in the dark for four weeks, embryogenic, scutellum-derived calli were excised and propagated on the same medium. After two weeks, the calli were multiplied or propagated by subculture on the same medium for another 2 weeks. Embryogenic callus pieces were sub-cultured on fresh medium 3 days before co-cultivation (to boost cell division activity).

[0490] Agrobacterium strain LBA4404 containing the expression vector was used for co-cultivation. Agrobacterium was inoculated on AB medium with the appropriate antibiotics and cultured for 3 days at 28° C. The bacteria were then collected and suspended in liquid co-cultivation medium to a density (OD₆₀₀) of about 1. The suspension was then transferred to a Petri dish and the calli immersed in the suspension for 15 minutes. The callus tissues were then blotted dry on a filter paper and transferred to solidified, co-cultivation medium and incubated for 3 days in the dark at 25° C. Co-cultivated calli were grown on 2,4-D-containing medium for 4 weeks in the dark at 28° C. in the presence of a selection agent. During this period, rapidly growing resistant callus islands developed. After transfer of this material to a regeneration medium and incubation in the light, the embryogenic potential was released and shoots developed in the next four to five weeks. Shoots were excised from the calli and incubated for 2 to 3 weeks on an auxin-containing medium from which they were transferred to soil. Hardened shoots were grown under high humidity and short days in a greenhouse.

[0491] Approximately 35 independent T0 rice transformants were generated for one construct. The primary transformants were transferred from a tissue culture chamber to a greenhouse. After a quantitative PCR analysis to verify copy number of the T-DNA insert, only single copy transgenic plants that exhibit tolerance to the selection agent were kept for harvest of T1 seed. Seeds were then harvested three to five months after transplanting. The method yielded single locus transformants at a rate of over 50% (Aldemita and Hodges 1996, Chan et al. 1993, Hiei et al. 1994).

### Corn Transformation

[0492] Transformation of maize (Zea mays) is performed with a modification of the method described by Ishida et al. (1996) Nature Biotech 14(6): 745-50. Transformation is genotype-dependent in corn and only specific genotypes are amenable to transformation and regeneration. The inbred line A188 (University of Minnesota) or hybrids with A188 as a parent are good sources of donor material for transformation, but other genotypes can be used successfully as well. Ears are harvested from corn plant approximately 11 days after pollination (DAP) when the length of the immature embryo is about 1 to 1.2 mm. Immature embryos are cocultivated with Agrobacterium tumefaciens containing the expression vector, and transgenic plants are recovered through organogenesis. Excised embryos are grown on callus induction medium, then maize regeneration medium, containing the selection agent (for example imidazolinone but various selection markers can be used). The Petri plates are incubated in the light at 25° C. for 2-3 weeks, or until shoots develop. The green shoots are transferred from each embryo to maize rooting medium and incubated at 25° C. for 2-3 weeks, until roots develop. The rooted shoots are transplanted to soil in the greenhouse. T1 seeds are produced from plants that exhibit tolerance to the selection agent and that contain a single copy of the T-DNA insert.

### Wheat Transformation

[0493] Transformation of wheat is performed with the method described by Ishida et al. (1996) Nature Biotech 14(6): 745-50. The cultivar Bobwhite (available from CIMMYT, Mexico) is commonly used in transformation. Immature embryos are co-cultivated with Agrobacterium tumefaciens containing the expression vector, and transgenic plants are recovered through organogenesis. After incubation with Agrobacterium, the embryos are grown in vitro on callus induction medium, then regeneration medium, containing the selection agent (for example imidazolinone but various selection markers can be used). The Petri plates are incubated in the light at 25° C. for 2-3 weeks, or until shoots develop. The green shoots are transferred from each embryo to rooting medium and incubated at 25° C. for 2-3 weeks, until roots develop. The rooted shoots are transplanted to soil in the greenhouse. T1 seeds are produced from plants that exhibit tolerance to the selection agent and that contain a single copy of the T-DNA insert.

### Soybean Transformation

[0494] Soybean is transformed according to a modification of the method described in the Texas A&M U.S. Pat. No. 5,164,310. Several commercial soybean varieties are amenable to transformation by this method. The cultivar Jack (available from the Illinois Seed foundation) is commonly used for transformation. Soybean seeds are sterilised for in vitro sowing. The hypocotyl, the radicle and one cotyledon are excised from seven-day old young seedlings. The epicotyl and the remaining cotyledon are further grown to develop axillary nodes. These axillary nodes are excised and incubated with Agrobacterium tumefaciens containing the expression vector. After the cocultivation treatment, the explants are washed and transferred to selection media. Regenerated shoots are excised and placed on a shoot elongation medium. Shoots no longer than 1 cm are placed on rooting medium until roots develop. The rooted shoots are transplanted to soil in the greenhouse. T1 seeds are produced from plants that exhibit tolerance to the selection agent and that contain a single copy of the T-DNA insert.

### Rapeseed/Canola Transformation

[0495] Cotyledonary petioles and hypocotyls of 5-6 day old young seedling are used as explants for tissue culture and transformed according to Babic et al. (1998, Plant Cell Rep 17: 183-188). The commercial cultivar Westar (Agriculture Canada) is the standard variety used for transformation, but other varieties can also be used. Canola seeds are surface-sterilized for in vitro sowing. The cotyledon petiole explants with the cotyledon attached are excised from the in vitro seedlings, and inoculated with Agrobacterium (containing the expression vector) by dipping the cut end of the petiole explant into the bacterial suspension. The explants are then cultured for 2 days on MSBAP-3 medium containing 3 mg/l BAP, 3% sucrose, 0.7% Phytagar at 23° C., 16 hr light. After two days of co-cultivation with Agrobacterium, the petiole explants are transferred to MSBAP-3 medium containing 3 mg/l BAP, cefotaxime, carbenicillin, or timentin (300 mg/l) for 7 days, and then cultured on MSBAP-3 medium with cefotaxime, carbenicillin, or timentin and selection agent until shoot regeneration. When the shoots are 5-10 mm in length, they are cut and transferred to shoot elongation medium (MSBAP-0.5, containing 0.5 mg/l BAP). Shoots of about 2 cm in length are transferred to the rooting medium (MS0) for root induction. The rooted shoots are transplanted to soil in the greenhouse. T1 seeds are produced from plants that exhibit tolerance to the selection agent and that contain a single copy of the T-DNA insert.

### Alfalfa Transformation

[0496] A regenerating clone of alfalfa (Medicago sativa) is transformed using the method of (McKersie et al., 1999 Plant Physiol 119: 839-847). Regeneration and transformation of alfalfa is genotype dependent and therefore a regenerating plant is required. Methods to obtain regenerating plants have been described. For example, these can be selected from the cultivar Rangelander (Agriculture Canada) or any other commercial alfalfa variety as described by Brown D C W and A Atanassov (1985. Plant Cell Tissue Organ Culture 4: 111-112). Alternatively, the RA3 variety (University of Wisconsin) has been selected for use in tissue culture (Walker et al., 1978 Am J Bot 65:654-659). Petiole explants are cocultivated with an overnight culture of Agrobacterium tumefaciens C58C1 pMP90 (McKersie et al., 1999 Plant Physiol 119: 839-847) or LBA4404 containing the expression vector. The explants are cocultivated for 3 d in the dark on SH induction medium containing 288 mg/L Pro, 53 mg/L thioproline, 4.35 g/L K2SO4, and 100 μm acetosyringinone. The explants are washed in half-strength Murashige-Skoog medium (Murashige and Skoog, 1962) and plated on the same SH induction medium without acetosyringinone but with a suitable selection agent and suitable antibiotic to inhibit Agrobacterium growth. After several weeks, somatic embryos are transferred to BOi2Y development medium containing no growth regulators, no antibiotics, and 50 g/L sucrose. Somatic embryos are subsequently germinated on half-strength Murashige-Skoog medium. Rooted seedlings were transplanted into pots and grown in a greenhouse. T1 seeds are produced from plants that exhibit tolerance to the selection agent and that contain a single copy of the T-DNA insert.

### Example 9

### Phenotypic Evaluation Procedure

### 9.1 Evaluation Setup

[0497] Approximately 35 independent T0 rice transformants were generated. The primary transformants were transferred from a tissue culture chamber to a greenhouse for growing and harvest of T1 seed. Six events, of which the T1 progeny segregated 3:1 for presence/absence of the transgene, were retained. For each of these events, approximately 10 T1 seedlings containing the transgene (hetero- and homo-zygotes) and approximately 10 T1 seedlings lacking the transgene (nullizygotes) were selected by monitoring visual marker expression. The transgenic plants and the corresponding nullizygotes were grown side-by-side at random positions. Greenhouse conditions were of shorts days (12 hours light), 28° C. in the light and 22° C. in the dark, and a relative humidity of 70%.

[0498] Four T1 events were further evaluated in the T2 generation following the same evaluation procedure as for the T1 generation but with more individuals per event. From the stage of sowing until the stage of maturity the plants were passed several times through a digital imaging cabinet. At each time point digital images (2048×1536 pixels, 16 million colours) were taken of each plant from at least 6 different angles.

### Drought Screen

[0499] Plants from T2 seeds were grown in potting soil under normal conditions until they approached the heading stage. They were then transferred to a “dry” section where irrigation was withheld. Humidity probes were inserted in randomly chosen pots to monitor the soil water content (SWC). When SWC went below certain thresholds, the plants were automatically re-watered continuously until a normal level was reached again. The plants were then re-transferred again to normal conditions. The rest of the cultivation (plant maturation, seed harvest) was the same as for plants not grown under abiotic stress conditions. Growth and yield parameters are recorded as detailed for growth under normal conditions.

### Nitrogen Use Efficiency Screen

[0500] Rice plants from T2 seeds are grown in potting soil under normal conditions except for the nutrient solution. The pots were watered from transplantation to maturation with a specific nutrient solution containing reduced N nitrogen (N) content, usually between 7 to 8 times less. The rest of the cultivation (plant maturation, seed harvest) was the same as for plants not grown under abiotic stress. Growth and yield parameters are recorded as detailed for growth under normal conditions.

### 9.2 Statistical Analysis: F Test

[0501] A two factor ANOVA (analysis of variants) was used as a statistical model for the overall evaluation of plant phenotypic characteristics. An F test was carried out on all the parameters measured of all the plants of all the events transformed with the gene of the present invention. The F test was carried out to check for an effect of the gene over all the transformation events and to verify for an overall effect of the gene, also known as a global gene effect. The threshold for significance for a true global gene effect was set at a 5% probability level for the F test. A significant F test value points to a gene effect, meaning that it is not only the mere presence or position of the gene that is causing the differences in phenotype.

[0502] Because two experiments with overlapping events were carried out, a combined analysis was performed. This is useful to check consistency of the effects over the two experiments, and if this is the case, to accumulate evidence from both experiments in order to increase confidence in the conclusion. The method used was a mixed-model approach that takes into account the multilevel structure of the data (i.e. experiment-event-segregants). P values were obtained by comparing likelihood ratio test to chi square distributions.

### 9.3 Parameters Measured

### Biomass-Related Parameter Measurement

[0503] From the stage of sowing until the stage of maturity the plants were passed several times through a digital imaging cabinet. At each time point digital images (2048×1536 pixels, 16 million colours) were taken of each plant from at least 6 different angles. The plant aboveground area (or leafy biomass) was determined by counting the total number of pixels on the digital images from aboveground plant parts discriminated from the background. This value was averaged for the pictures taken on the same time point from the different angles and was converted to a physical surface value expressed in square mm by calibration. Experiments show that the aboveground plant area measured this way correlates with the biomass of plant parts above ground. The above ground area is the area measured at the time point at which the plant had reached its maximal leafy biomass. The early vigour is the plant (seedling) aboveground area three weeks post-germination. Increase in root biomass is expressed as an increase in total root biomass (measured as maximum biomass of roots observed during the lifespan of a plant); or as an increase in the root/shoot index (measured as the ratio between root mass and shoot mass in the period of active growth of root and shoot).

[0504] Early vigour was determined by counting the total number of pixels from aboveground plant parts discriminated from the background. This value was averaged for the pictures taken on the same time point from different angles and was converted to a physical surface value expressed in square mm by calibration. The results described below are for plants three weeks post-germination.

### Seed-Related Parameter Measurements

[0505] The mature primary panicles were harvested, counted, bagged, barcode-labelled and then dried for three days in an oven at 37° C. The panicles were then threshed and all the seeds were collected and counted. The filled husks were separated from the empty ones using an air-blowing device. The empty husks were discarded and the remaining fraction was counted again. The filled husks were weighed on an analytical balance. The number of filled seeds was determined by counting the number of filled husks that remained after the separation step. The total seed yield was measured by weighing all filled husks harvested from a plant. Total seed number per plant was measured by counting the number of husks harvested from a plant. Thousand Kernel Weight (TKW) is extrapolated from the number of filled seeds counted and their total weight. The Harvest Index (HI) in the present invention is defined as the ratio between the total seed yield and the above ground area (mm²), multiplied by a factor 10⁶. The total number of flowers per panicle as defined in the present invention is the ratio between the total number of seeds and the number of mature primary panicles. The seed fill rate as defined in the present invention is the proportion (expressed as a %) of the number of filled seeds over the total number of seeds (or florets).

### Example 10

### Results of the Phenotypic Evaluation of the Transgenic Plants

[0506] Transgenic rice plants expressing a nucleic acid encoding the PEPC polypeptide (SEQ ID NO: 1) under the control of a protochlorophyllid reductase promoter gave the following results in either the T1 or T2 generation or both.

| Parameter | Normal conditions | Drought |
|---|---|---|
| Total seed weight | Increase in 4 out of 4 events. | Increase in 5 out of 5 events. |
| | 12% overall increase | 28% overall increase |
| Number filled seeds | Increase in 4 out of 4 events. | Increase in 5 out of 5 events. |
| | 10% overall increase | 27% overall increase |
| Fill rate | Increase in 4 out of 4 events. | Increase in 5 out of 5 events. |
| | 8% overall increase | 18% overall increase |
| Number flowers per | Increase in 4 out of 4 events. | Increase in 5 out of 5 events. |
| panicle or Number of | 8% overall increase | 19% overall increase |
| seeds | | |
| Harvest index | Increase in 4 out of 4 events. | Increase in 5 out of 5 events. |
| | 13% overall increase | 22% overall increase |

[0507] In addition to the results shown above, the plants overexpressing PEPC under drought conditions also showed an increase in plant height (with 2 out of 5 lines giving an average 11.5% increase); an increase in root thickness (with 4 out of 5 lines giving an average of 23.5% increase); an increase in aboveground area (with 2 out of 5 lines giving an average increase of 14%); and an increase in emergence vigour (with 2 out of 5 lines giving a 47.5% increase).

[0508] Transgenic plants expressing a nucleic acid encoding the Class III U-box polypeptide (SEQ ID NO: 74) under the control of a protochlorophyllid reductase promoter gave the following results.

### Results Under Non-Stressed Conditions:

[0509] Transgenic rice plants showed an increase in height, aboveground area, number of panicles, number of flowers, TKW (thousand kernel weight), total seed weight, total number seeds and in the total number of filled seeds relative to control plants.

### Results Under (Mild) Drought Conditions:

[0510] Transgenic rice plants showed an increase in height, aboveground area, total weight seeds and in the number of filled seeds relative to control plants.

[0511] Transgenic rice plants expressing a nucleic acid encoding the PQQC polypeptide (SEQ ID NO: 104) under the control of a protochlorophyllid reductase promoter gave the following results.

### Results Under Non-Stressed Conditions:

[0512] Transgenic rice plants showed an increase in height, aboveground area, number of panicles, number of flowers, total seed weight, total number seeds, number of filled seeds relative to control plants.

[0513] B. Transgenic rice plants expressing a nucleic acid encoding the PQQC polypeptide (SEQ ID NO: 104) under the control of a protochlorophyllid reductase promoter gave the following results. Similar results were obtained for transgenic rice plants expressing a nucleic acid encoding the PQQC polypeptide (SEQ ID NO: 104) under the control of a GOS2 promoter.

### Results Under (Mild) Drought Conditions:

[0514] Transgenic rice plants showed an increase in height, fill rate, TKW (thousand kernel weight), number of filled seeds and in the total weight of seeds relative to control plants.

The application's sequence listing, which the Patent Office published only in electronic form, follows.

SEQUENCE LISTING (246 sequences)

SEQ ID NO: 1 - DNA, 3146 bp, Synechocystis sp.
tacaaaaaagcaggcttaaacaatgaacttggcagttcctgcattcggtctttccactaactggtctggtaatggcaatggttccaactctgaagaagagtcggtgctttaccagcggttaaagatggtggaggaattgtgggaaagggtgctccaaagcgaatgtggccaggaattggtggatttgctgacggaattaaggcttcagggtacccatgaggcgatcaccagcgaaatttccgaagaagtcatcatgggtattacccagcgcattgagcatttagaactcaatgatgccatccgggcggctcgggcctttgccctatatttccagttgatcaacatcgttgaacagcactacgaacaaaacgagcaacaacggaatcgttgggaagcttcccaggaaaccaacttctatgagcaggcgggcaatgaggaagaaatggtccccccatcccgattaggcgcgtcaacggaaccattgccagtgggcattgaccagaatgaattgcaagcttctgtaggtacgttccattggttaatgagggagctaaaacgcctcaatgtgcccccccaacatatccaaaatttattggatcatctggacattcgcctggtgatcaccgctcaccccacggaaattgtccgtcacaccatccggcgcaaacaaagaagggtggaccgcattcttcgtaaactagatcaactccagggttctgtgaccggtcgggactggctcaacacctgggatgcaaaaacggcgatcgcccaattaacggaggaaattcgcttttggtggcgtaccgacgaacttcatcagttcaaacccactgtgttggacgaagtggactattccctccattattttgatgaagtactgttcgacgctgtaccggaattgtccaaacggttaggacaagctattaaagaaacctttccccatctgcgggccccccgggctaatttttgttattttggctcctgggtcggtggcgatcgggacggcaacccttcggtaaccccagaagtgacctggcagacggcctgttaccagcggggtttagtgctggggaaatatttgtttagtttgggggaactggtggccattcttagcccttccctccattggtgcaaagtctcccaggaattgttggactctttggaacgggaccgcattcaattaccggaaatttacgaagaactttctctccgctatcgccaggaaccctatcggatgaagctggcctacgttaccaaacggctggaaaacaccctgcggcgtaataatcgtctagccaacccagaagaacggcaaacgatgatcaccatgccggccgaaaatcactatcgcactggggaagaattattagaggaattaagactcattcagcgtaatctgaccgaaactggtttaacctgcctggagttggaaaatttgattacccagttggaagtctatggctttaacctagcccagttggattttcgccaggaatcttcccgccacgccgaggcgatcgccgaaattgctgagtatatgggggtactcaccactccctacgaagaaatggccgaagaagataaattagcctggttaggggtagaactgcaaacccgccgtcctttaattccccaggaaatgcccttttcggagcggactagggaaaccattgaaaccctccgcaccctgcgccatctacaaatggaatttggggtggatatttgccaaacctacatcatcagcatgaccaacgatgccagtgatgtgttggaagtattgctgttagccaaggaagccggattgtatgacccggccaccgcctccaattccctccgcattgtgcccctgtttgaaacagtagaagatctcaaaaacgctccggggattatggattctcttttcagcttgcctttttaccgggctacattggcgggcagttaccattccttaaaagagttgcaaaatcagccaccggattattaccaaattcccaccaccacagccctactaaatcccggcaatctccaggaaattatggtgggctattccgacagcaataaagactccggctttttgagcagtaactgggaaattcataaggcccaaaaatcactgcaggcagtggcccaaagccatcgggtaattctccggctgttccacggtcgaggaggatctgttggccgggggggcggcccggcctataaagccattttggcccagcccgcaggcaccgtggacggtcggatcaaaattaccgaacaaggggaagtgttagcttctaaatattccctgccagagttggccctctacaacctggaaactttaaccacggcggtcatccaagctagtttacttaaaagtagttttgatttcattgagccctggaaccggattatggaggagttggcctgcactgcccgtcgagcctaccggagtttgatttacgaagaaccggactttttagatttcttcctgacggttacccccattcctgaaattagcgagttacagattagttcccgccctgcccgacgtaaggggggtaaagcggatctcagcagtttgcgggccattccctgggtgttcagttggacccaaacccgtttcctgctgccggcttggtatggggtgggcacggcgttgaaatcctttgtggaccaagacccggtcaaaaatatgaagttgttgcgttacttctatttcaaatggcctttcttcaacatggtgatctcgaaggtggaaatgaccctttccaaggtggacctcaccatcgcttcccactatgtgcaagagctatctaagccagaagaccgggaacgattcgatcgcctttttcagcagatcaagcaagagtatcaattaaccagggactttgccatggaaattacggcccatccccacctcctggacggcgatcgctctttgcaacggtcggtactcctacgaaatcgtactattgttcccctggggctactgcagatttccctgctgaaacgtttacgccaagtaacccaggaagcggagaccagcggcgtgcgttaccgtcgttattccaaagaagaactactgcggggagctctgttaaccattaacggtattgcggccggaatgcgtaatactggttgaacccagctttcttgtacaa

SEQ ID NO: 2 - protein, 1034 aa, Synechocystis sp.
MNLAVPAFGLSTNWSGNGNGSNSEEESVLYQRLKMVEELWERVLQSECGQELVDLLTELRLQGTHEAITSEISEEVIMGITQRIEHLELNDAIRAARAFALYFQLINIVEQHYEQNEQQRNRWEASQETNFYEQAGNEEEMVPPSRLGASTEPLPVGIDQNELQASVGTFHWLMRELKRLNVPPQHIQNLLDHLDIRLVITAHPTEIVRHTIRRKQRRVDRILRKLDQLQGSVTGRDWLNTWDAKTAIAQLTEEIRFWWRTDELHQFKPTVLDEVDYSLHYFDEVLFDAVPELSKRLGQAIKETFPHLRAPRANFCYFGSWVGGDRDGNPSVTPEVTWQTACYQRGLVLGKYLFSLGELVAILSPSLHWCKVSQELLDSLERDRIQLPEIYEELSLRYRQEPYRMKLAYVTKRLENTLRRNNRLANPEERQTMITMPAENHYRTGEELLEELRLIQRNLTETGLTCLELENLITQLEVYGFNLAQLDFRQESSRHAEAIAEIAEYMGVLTTPYEEMAEEDKLAWLGVELQTRRPLIPQEMPFSERTRETIETLRTLRHLQMEFGVDICQTYIISMTNDASDVLEVLLLAKEAGLYDPATASNSLRIVPLFETVEDLKNAPGIMDSLFSLPFYRATLAGSYHSLKELQNQPPDYYQIPTTTALLNPGNLQEIMVGYSDSNKDSGFLSSNWEIHKAQKSLQAVAQSHRVILRLFHGRGGSVGRGGGPAYKAILAQPAGTVDGRIKITEQGEVLASKYSLPELALYNLETLTTAVIQASLLKSSFDFIEPWNRIMEELACTARRAYRSLIYEEPDFLDFFLTVTPIPEISELQISSRPARRKGGKADLSSLRAIPWVFSWTQTRFLLPAWYGVGTALKSFVDQDPVKNMKLLRYFYFKWPFFNMVISKVEMTLSKVDLTIASHYVQELSKPEDRERFDRLFQQIKQEYQLTRDFAMEITAHPHLLDGDRSLQRSVLLRNRTIVPLGLLQISLLKRLRQVTQEAETSGVRYRRYSKEELLRGALLTINGIAAGMRNTG

SEQ ID NO: 3 - DNA, 3182 bp, Anacystis nidulans
ctgggtctccttgagatcgtatgctcgctgtatctctcagggatcacggcttcccgtcagcaactgtccagatccgccctgcgttctgtgtccagtcagacgtggtgggatcagggaatccacctagaatgaattactgccagaacgctcgaactgccatgagtgctgctctccagtcatccgacgatgctttccgaaccgtttcgagtcccctcgccacggatttggatctgtcgtctccgctggagtttttccttcgccatcgcttgacggtggttgaagaactctgggaagtggttttgcgccaagagtgcggccaagagctggtcgatattctgactcagctgcgtgacttgacctcgccggaaggccaagccccagaagtgggcggcgaagccttggttcaggtgattgaaaccctagagttgagcgatgcgattcgggctgcccgtgcctttgcgctctactttcagctgatcaatattgttgagcagcactacgagcaaactcaatatcaactcgcctacgagcgatcgcggttggaacccttgccaggaccagatgaaagtccggagggattgcacaccattgaaattcctcagcatcagctcgatccctttgctgcggtgattccgctcaaccaagatccggcaaccttccaaacgctgttcccgcgcctgcgccagctcaatgtgccgccgcaaatgatccaagagctgaccgatcgcctcgatattcggctggttttcaccgctcacccgacggaaattgtccgccacacgattcgcgacaaacaacgccgaattgcctacctgctgcggcaactggatgagctcgaaacaggcaaaaaccgaggctttcgagagcttgaagcgcagaatattcgtcagcagctgaccgaggagattcggctctggtggcggacggatgagctccaccagttcaagccaacggtgttggatgaggtggactacgcgctccactacttccaagaagtcctctttgaggccattcctctgctctatcagcgctttcggctcgcgctgcaggggactttccccgacctacaaccgccccgctacaacttctgccagttcggctcttgggtcggctccgatcgcgatggcaatccttcagtgacctctgccgtcacttggcaaaccgcttgctatcagcgcagtctcgtcctcgatcgctacatcacagcggttgaacatctccgcaatgtgctcagcctctcgatgcactggagcgaggtgctgccggagttgctcagctcgttggaacaggagagcatgctcttcccggagacctatgagcagctagcggtccgctatcgccaagagccctatcgcctcaagctctcctatattctggagcgcctgcacaacacccgcgatcgcaatacccgcctccaacagcagcaagaaaaagatcccaccacgcccctgcccgaatatcgggatggcaccctctaccaggctggtacggcctttctcgaagatctcaagctgattcagcacaaccttaagcagacgggactgagctgttacgagctagagaagttgatctgccaggtcgagatctttggtttcaacctggtccatctcgacattcgccaagaaagctcgcgccattccgacgcgatcaacgaaatctgtgaatacctccaaattcttccccagccctacaacgagctgagcgaagcagaacgaactgcctggctggttcaagagctgaaaacccgtcggccgctggtaccagcgcgcatgccgttctcagaatcgacccgcgagatcattgaaaccctgcggatggtcaagcagctacaggaagaatttggggaggcggcttgccaaacctacatcatcagcatgagccgcgagctgagcgacctgctggaagtgctgctgctggccaaggaggttggtctctacgacccagtcaccggcaagagttcgcttcaggtgattccgctgtttgaaactgtggaggacttacaaaatgccccgcgggtgatgacggcgctgtttgagctgcccttctacacccagctcaaccccacccagtctgaaccgctgcaggaagtgatgctggggtattccgacagtaacaaggactcgggcttcctcagcagtaactgggagatccacaaggcccagaaagccctagggacggtagcccgcgaccaccgcgtcaagctgcggatcttccacggccgcgggggctccgtcggtcgaggtggtggccctgcctacgaggcgatcttggcccagccgggtcgcaccacagatggccgaatcaagattacggaacagggcgaggtcttggcttcgaaatacgccctgcccgaactggcgctctataaccttgagacgatcacgacggcggtgattcagtccagcctgctgggtagcggctttgatgacattgagccgtggaaccaaattatggaagagttggcggcgcgatcgcggcgacattaccgcgctttggtgtacgagcagcccgacctggttgacttcttcaatcaggtaacgccgattgaggagatcagcaaactgcaaatcagctcgcgaccggctcgacgcaaaaccggcaagcgcgatctgggcagtctacgtgccatcccctgggtctttagctggacgcagagtcgttttctgctgccctcttggtatggcgtcggcacagcacttcaggagtttttgcaggagcgcccggagcagaacctcaacctgctgcgctacttctacgagaagtggccgttcttccgcatggtgatctcgaaggtcgagatgaccctagcgaaggtcgatttgcagattgctcatcactacgtgcatgagctggccaatcctgaggatcaagagcggtttgaacgagtgttcagccaaatcgctgcagagtttcagctgacttgtcatctcgtgttgacgattaccaaccacggtcgcttgctggatggcgaccccgaactgcagcgatcggtgcagctgcgcaacggtacgatcgtgcccctcggcttcttgcaagtcgccctgcttaaacgcctgcggcagtatcgccagcaaacggaaacgacgggattgatgcgatcgcgctatagcaaaggggaactgctgcgcggagcattgctgacgatcaacggcattgcggctggcatgcgcaatacaggttga

SEQ ID NO: 4 - protein, 1053 aa, Synechococcus elongatus
MLAVSLRDHGFPSATVQIRPAFCVQSDVVGSGNPPRMNYCQNARTAMSAALQSSDDAFRTVSSPLATDLDLSSPLEFFLRHRLTVVEELWEVVLRQECGQELVDILTQLRDLTSPEGQAPEVGGEALVQVIETLELSDAIRAARAFALYFQLINIVEQHYEQTQYQLAYERSRLEPLPGPDESPEGLHTIEIPQHQLDPFAAVIPLNQDPATFQTLFPRLRQLNVPPQMIQELTDRLDIRLVFTAHPTEIVRHTIRDKQRRIAYLLRQLDELETGKNRGFRELEAQNIRQQLTEEIRLWWRTDELHQFKPTVLDEVDYALHYFQEVLFEAIPLLYQRFRLALQGTFPDLQPPRYNFCQFGSWVGSDRDGNPSVTSAVTWQTACYQRSLVLDRYITAVEHLRNVLSLSMHWSEVLPELLSSLEQESMLFPETYEQLAVRYRQEPYRLKLSYILERLHNTRDRNTRLQQQQEKDPTTPLPEYRDGTLYQAGTAFLEDLKLIQHNLKQTGLSCYELEKLICQVEIFGFNLVHLDIRQESSRHSDAINEICEYLQILPQPYNELSEAERTAWLVQELKTRRPLVPARMPFSESTREIIETLRMVKQLQEEFGEAACQTYIISMSRELSDLLEVLLLAKEVGLYDPVTGKSSLQVIPLFETVEDLQNAPRVMTALFELPFYTQLNPTQSEPLQEVMLGYSDSNKDSGFLSSNWEIHKAQKALGTVARDHRVKLRIFHGRGGSVGRGGGPAYEAILAQPGRTTDGRIKITEQGEVLASKYALPELALYNLETITTAVIQSSLLGSGFDDIEPWNQIMEELAARSRRHYRALVYEQPDLVDFFNQVTPIEEISKLQISSRPARRKTGKRDLGSLRAIPWVFSWTQSRFLLPSWYGVGTALQEFLQERPEQNLNLLRYFYEKWPFFRMVISKVEMTLAKVDLQIAHHYVHELANPEDQERFERVFSQIAAEFQLTCHLVLTITNHGRLLDGDPELQRSVQLRNGTIVPLGFLQVALLKRLRQYRQQTETTGLMRSRYSKGELLRGALLTINGIAAGMRNTG

SEQ ID NO: 5 - DNA, 2988 bp, Synechococcus sp.
atgaaccaagtcatgcatccccccagtgccgaagctgaacttttgtccacttcccaatctctcctccggcaacgcctcacgctggttgaagacatttggcaggcggtgttgcagaaagaatgtggtcaaaaactcgtcgaacggctcaatcatctccgggcaacccgaaccgccgatggccaaagcctaaacttctctccaagtagtatttctgagctgatcgaaaccctagatctagaagatgcgatccgggcagcacgggcttttgccctctatttccagctgatcaatagcgtcgagcaacattacgaacagcgcgaacaacaacaatttcggcggaacctcgcctctgccaatgccagcgaagccaacggtaacagcgtccatacagaaattgcccccacccaagccggcacctttgattggttgtttccccatctcaagcaccaaaatatgccgccccagacgatccagcgtcttctcaatcagttggatattcgactggtatttacggcccaccccacggagattgtccgccacacgattcgcaataagcagcggcggattgcggggatcctacggcaactggatcaaaccgaagaagggctgaaaagcttggggacaagcgattcttgggaaattgaaaatattcagcagcaacttaccgaagaaattcggctctggtggcgcaccgatgagctgcaccaatttaaaccccaggtgttggacgaagtggactatgcgttgcattattttgaggaagttctgtttgacaccctgcccgaattatcggtacggctccaacaggccctaaaggcatctttcccaaccctcaaggtgcccaccaccaatttttgtaattttggctcttgggtcgggggcgatcgcgatggcaacccttctgtcactcctgacgttacgtggaagacagcttgctatcaacggggtttggtgctggaacgctacatcgcctcggtggaatccctctcggatgtgttgagcttatcgctgcactggagtaatgtgctgccggatctgctgcattcatcgtaccaagatcagaatattttccccgacgtctatcaaagcctggccagtcgtcaccgtcaagaaccctatcgtctcaagtcagcctacattaagcggcgcttggaaaataccttggagcgcaaccgtcgtctagcgaatatgcccgcctgggaaaataaagtagaagcggccgatgacaaggtttatatttgtggccaggagtttctcgcagacctaaaactgatccgcgaaagcctggtacagacggaaatcaactgtgcggccctggataaactcatttgccaagtcgaaatttttagctttgtgctcactcgccttgattttcgccaagaatcaacgcgccactccgatgcgatcgccgaaattgttgactacctgagtattgcccaaatcctacaacgacctaagcgacgcagaaaaaaccaccttggtctagtgcaggaattaaaaacccgccgtcccttgattccgaaggaaatgcacttttcggaaagaaccgtcgagacgatccaaacgctccaggtgctgcgccgtctccagcaggaatttggcatcggcatttgccagacctacatcatcagcatgaccaacgaagtcagtgatgtcttagaggtgctgctcttggcccaggaagcgggtttgtatgaccccctcacagggatgaccaccatccgcattgcccccctctttgagacggtggacgacctgcgtaacgccccggaaatcatgcaggcgttgtttgaaattcccctctatcgcgcttgtttagctggtggctatgaaccccccgccgatggccgctgtgatgaaacctttggcgatcgcctggtgccgaatctccaggaaattatgctcggctattccgacagcaacaaagattccggcttcctcagtagtaattgggaaatccacaaagcccagaaaaatctccaacaagtggccgatccctacggcattgacctccgcattttccatggtcgcggtggttccgttggtcggggcggcggccctgcctacgccgctattttggcccaaccgcccaacaccatcaatggccggattaaaatcaccgaacagggggaagtgctggcgtctaaatattccctcccagacttggcgctatatcacctcgaaagcgtttctacggcggtgattcaatcgagtttgttagccagtggctttgatgatattcagccctggaaccggattatggaagacctctcccagcgatcgcgggcggcttaccgggcgttaatttacgaagaacccgacttcctcgactttttcatgtccgtgacgccgattccggaaattagccaactgcaaatcagttcccgtccggcccgtcgcaaaaaaggcaataaagatttgagtagtctccgggcgattccctgggtctttagctggacccaaagccgcttcctcgtgcccgcttggtatggtgtgggtaccgcgctccagggcttttttgaagaggatcccgtcgagaacctgaagttaatgcgctatttctacagtaaatggccctttttccggatggtgatctcaaaggtagagatgaccctttctaaggtggacttacaaatggcgagccactatgtccacgaactggcggaaaaagaagatattccccggtttgaaaagcttctagagcagatttcccaggaatacaacctcacgaagcggctaatcctcgaaattaccgaaaatgaagccctcctcgatggcgatcgccccctccagcgttctgtccaactgagaaatggcaccattgtccccctcggtttcctgcaagtctcattgctcaaacggctacgtcaatacaccagggaaacccaagccagtatcgttcacttccgctacagcaaagaagaactcctgcggggcgcccttttaaccatcaatggcatcgccgccggaatgcggaacacgggttga

SEQ ID NO: 6 - protein, 995 aa, Synechococcus sp.
MNQVMHPPSAEAELLSTSQSLLRQRLTLVEDIWQAVLQKECGQKLVERLNHLRATRTADGQSLNFSPSSISELIETLDLEDAIRAARAFALYFQLINSVEQHYEQREQQQFRRNLASANASEANGNSVHTEIAPTQAGTFDWLFPHLKHQNMPPQTIQRLLNQLDIRLVFTAHPTEIVRHTIRNKQRRIAGILRQLDQTEEGLKSLGTSDSWEIENIQQQLTEEIRLWWRTDELHQFKPQVLDEVDYALHYFEEVLFDTLPELSVRLQQALKASFPTLKVPTTNFCNFGSWVGGDRDGNPSVTPDVTWKTACYQRGLVLERYIASVESLSDVLSLSLHWSNVLPDLLHSSYQDQNIFPDVYQSLASRHRQEPYRLKSAYIKRRLENTLERNRRLANMPAWENKVEAADDKVYICGQEFLADLKLIRESLVQTEINCAALDKLICQVEIFSFVLTRLDFRQESTRHSDAIAEIVDYLSIAQILQRPKRRRKNHLGLVQELKTRRPLIPKEMHFSERTVETIQTLQVLRRLQQEFGIGICQTYIISMTNEVSDVLEVLLLAQEAGLYDPLTGMTTIRIAPLFETVDDLRNAPEIMQALFEIPLYRACLAGGYEPPADGRCDETFGDRLVPNLQEIMLGYSDSNKDSGFLSSNWEIHKAQKNLQQVADPYGIDLRIFHGRGGSVGRGGGPAYAAILAQPPNTINGRIKITEQGEVLASKYSLPDLALYHLESVSTAVIQSSLLASGFDDIQPWNRIMEDLSQRSRAAYRALIYEEPDFLDFFMSVTPIPEISQLQISSRPARRKKGNKDLSSLRAIPWVFSWTQSRFLVPAWYGVGTALQGFFEEDPVENLKLMRYFYSKWPFFRMVISKVEMTLSKVDLQMASHYVHELAEKEDIPRFEKLLEQISQEYNLTKRLILEITENEALLDGDRPLQRSVQLRNGTIVPLGFLQVSLLKRLRQYTRETQASIVHFRYSKEELLRGALLTINGIAAGMRNTG

SEQ ID NO: 7 - DNA, 3333 bp, Anabaena variabilis
cgcctgcctattttacccttccctgatgacgatgaatcaaccaattaaagtttaaaaatatacttcaaaaatatgctcacataagtagataagagcataagttaccaaaaatcaatctgttaaacagtaattggctttacaagagaagcaagtatgggttctgttttatactctttatctgaatctgctaatttatatccagcatcggaattattcttgcgtcatcgtctccaaatagtagaagaactgtgggagtcggtactgcggcaagaatgcggccaaaatatggtggatttgttacggcagttgcgtgatttgtgttcaccagaagggcaagccacaaaagaccaagcagtttctgctgtcaagttaattgaacagttgaatattaatgaagccattcgggcagctagggcttttgctttgtattttcagctgatcaacatcatagagcaggaatatgagcaaaggcagcaattaactcgctattctgacttagaagcggaaacagcacccctaaatggttccgaaaacattacctcatcctctaaccacaacgaagatgatgttattttcaaccggggtttagggactgatttcttaggaaaaaattggactaatcgtggacaagggaaacaaaaaggtacttttgcagcgttatttcccttattgtctaaattgaatgtcccaccccaacaaattcaacgcctgatttcccaactagatgtccgtttggtattcactgcccacccaacggaaattgtccgccacaccattcgggacaaacaacggcaagtagtagatttgttgcaacaactcgatgaggtggaaaatcgagctaaggacggcggcggctatccttgggaagcgggggaaattcgggaaaaattgctagaagaaattcgcttgtggtggcgtacagacgaactccaccagtttaagcccactgtgctggatgaagtggattatgctttgcattacttccaagaagttttatttgatgggattccccaactgtataagcgtttcaaatacgccctaaatcaaactttctcctggttagaaccaccaagcaaagatttctgttcctttggttcttgggtaggttcagacagagatggtaatccatcggtaacaccggaaattacctggcagacagcttgttatcagcgcaaaatggtgctggaaagatatatcaagtctgtcacccaattgattgaattattaagtatctccatgcactggagtgacgttttaccagacttattggaatccttggagttagatcagtcccagttaagtgaagtatacgatgctctggcgctgagatatcgccaagaaccctatcgtctcaaactagcttacgtcctcaagcgcctggaaaatacccgcgatcgcaatttagctttatataaaggtgaaacccccacaaatgaagatagccccatgtatcgttcggggtcggaatttttggcggaactgcgattaattcagcataacttgacggaaacaggtttaagctgccgagaattggataatttgatctgtcaagtggaaatttttgactttaacctgacaaaattagacatccgtcaagaatccaccagacattcggacgcgttaaacgagattctcgactatctccaattattaccccagccatacaacgacctctccgaagaacagcgagttgcttggctaacaaccgaactgcaaacccgtcgcccattaatttcgtcagaactaccattctctgacaaaactaatgatgtcattaaaactttccgcgtagtgcgatcgctccaacaagaatttggcattaatatctgccaaacttacatcattagtatgtgtcgtcaagtcagcgatgtcttagaagttttgcttctagccaaagaagccagactttttgacccagcgatcgccgtcggtacaattcaggttgtaccattatttgagactgtcgaagatttacaacgttctcgcagcgtcatgcgacagttatttgaattacctctataccgcgctttgctagctggtggttacaaaaataccgaagtaaaagtaccgaatactgagctaacaccccaatccccagcccccagtccccagtccgtactcacccccgacttacaagaagtcatgctgggatattccgacagcaacaaagactccggcttcttgagtagcaattgggaaattcataaagcccaaaaatcattacagcaaatcgccgaagaatatggcgtaaatttgcggattttccacgggcgcggcggttctgtaggacgaggcggcggcccagcccacgaggcgattttggctcaaccaggacacagcatcaacgggcggattaaaattaccgaacaaggggaagtattagcctccaagtactccttgctagatttagccctgtacaacttggaaaccatcaccacggcggtgattcaagccagcctcctgcgaactgggtttgatgatatcgaaccttggaacgaaattatggaagaattagcagcgcgatcgcggcaacattatcgtggtttaatttacgaacagcctgatttcattgactttttccaccaagtcacacccattgaagaaatcagtcaactacaaattagttctcgtcccgcccgtcgtccttctggtaagaaagatttaagcagtctccgcgccattccttgggtatttagctggacacaaacacgattcttactaccttcttggtacggtgtcggtacagctttacaagaatttttcaacgaagaaccagaagaacatctcaaattgatgcgctacttttatgtcaagtggcctttcttcaagatggtgatttctaaagtagaaatgaccttggcgaaagtagatatgcaaatggctggtcactacgtacaagaattgtctgaccctgaagacaaaccccggtttgagaaagtatttgagcaaatcgccaacgaatattatctcaccagagatttagtcttaaaaatcaccgaccacggtcggcttttagatggtgatcctgtactccagcgttctgtacagttacgcaatggtacaatcgtcccactagggtttatccaagtttccctcctcaagcgcctacgccagtccaaaaataatactgcaacctctggtgtcattcactctcgttacagtaagggagaattattgcgcggcgcactgttaaccattaatggtattgccgcagggatgagaaatacaggttgatttgtgagttgtcagtagttagtggtcagtggtaaaacacatacaactgacaactgacaaccgaacaaatggtcaaaaataaaatcttaatctgtactg

SEQ ID NO: 8 - protein, 982 aa, Anabaena variabilis
MVDLLRQLRDLCSPEGQATKDQAVSAVKLIEQLNINEAIRAARAFALYFQLINIIEQEYEQRQQLTRYSDLEAETAPLNGSENITSSSNHNEDDVIFNRGLGTDFLGKNWTNRGQGKQKGTFAALFPLLSKLNVPPQQIQRLISQLDVRLVFTAHPTEIVRHTIRDKQRQVVDLLQQLDEVENRAKDGGGYPWEAGEIREKLLEEIRLWWRTDELHQFKPTVLDEVDYALHYFQEVLFDGIPQLYKRFKYALNQTFSWLEPPSKDFCSFGSWVGSDRDGNPSVTPEITWQTACYQRKMVLERYIKSVTQLIELLSISMHWSDVLPDLLESLELDQSQLSEVYDALALRYRQEPYRLKLAYVLKRLENTRDRNLALYKGETPTNEDSPMYRSGSEFLAELRLIQHNLTETGLSCRELDNLICQVEIFDFNLTKLDIRQESTRHSDALNEILDYLQLLPQPYNDLSEEQRVAWLTTELQTRRPLISSELPFSDKTNDVIKTFRVVRSLQQEFGINICQTYIISMCRQVSDVLEVLLLAKEARLFDPAIAVGTIQVVPLFETVEDLQRSRSVMRQLFELPLYRALLAGGYKNTEVKVPNTELTPQSPAPSPQSVLTPDLQEVMLGYSDSNKDSGFLSSNWEIHKAQKSLQQIAEEYGVNLRIFHGRGGSVGRGGGPAHEAILAQPGHSINGRIKITEQGEVLASKYSLLDLALYNLETITTAVIQASLLRTGFDDIEPWNEIMEELAARSRQHYRGLIYEQPDFIDFFHQVTPIEEISQLQISSRPARRPSGKKDLSSLRAIPWVFSWTQTRFLLPSWYGVGTALQEFFNEEPEEHLKLMRYFYVKWPFFKMVISKVEMTLAKVDMQMAGHYVQELSDPEDKPRFEKVFEQIANEYYLTRDLVLKITDHGRLLDGDPVLQRSVQLRNGTIVPLGFIQVSLLKRLRQSKNNTATSGVIHSRYSKGELLRGALLTINGIAAGMRNTG

SEQ ID NO: 9 - DNA, 3241 bp, Thermosynechococcus vulcanus
gtgaattatggcgttcgcgatcgcctgcaacacctggaactgattctgagcagcaaaacagcttagaactgttaacaaatccttaatacgcctgttatcaattgttgtaccgccctggttcaggattgggtaaagtaaggagtattatctttgcaggctggggtaaatatgacatcagtcctcgatgtgaccaatcgcgatcgcttaattgaaagtgaaagtttggcagcccgtaccctacaggaacggttgcgactggtggaagaggtcttggtcgatgtcttggcggcagaatcgggtcaagaattggttgatctattgcggcgcttgggggctctctcttcgccggaaggtcatgtgctccatgccccagaaggggaattgctgaaggttattgaatccctcgaactcaatgaggccattagagcggcccgggcttttaacctctactttcaaattatcaacatcgttgagcagcattacgaacaacaatacaaccgtgaacgcgctgcccaagagggattgcgccgccgcagtgtcatgagtgaaccaatttccggtgtcagtggtgaaggctttccgctgcctcatactgctgccaacgcaacggatgtgcgcagtgggccgagtgaacgcctagagcatagtctctacgaagccattcccgctactcagcagtatggttcctttgcttggctctttcctcggctgcagatgctgaatgtgccgccgcgccatattcaaaagcttttggatcaactggacattaagttggttttcactgctcacccgacggagattgtgcggcaaacgattcgtgataagcagcggcgggttgcccgattacttgagcaactggatgtgctggagggggcttctccacacctaacggattggaacgcccaaactttacgggcacaactgatggaggaaattcgcctctggtggcgcaccgatgagttgcaccaatttaagccggaggtgctcgatgaggtggaatacaccctccactacttcaaggaggtcatttttgctgtcattcccaagctctatcgccgtctggagcagtcattacatgaaacctttcccgcgcttcagcccccccgtcaccgtttctgccgctttggctcttgggtggggggcgatcgcgatggcaatccctatgtcaaaccagaagtaacgtggcaaacggcctgctatcagcgcaacttagttcttgaggagtatattaagtccgttgagcgcttaatcaatttgctcagcctgtccctgcactggtgcgatgtgctgccagatttgctagattcccttgagcaggatcaacggcaactcccgagtatctatgagcagtatgcggtgcgctatcggcaggaaccctaccgcctgaaactggcctatgtgctcaaacggctgcaaaatacccgcgatcgcaaccgggcgctgcaaacctattgcattcgccgcaatgaggcggaagagttaaataatggacagttttaccgccacggtgaagaattcttggcagaactgctgctcattcagcgtaacctcaaggaaacgggattggcctgccgcgaattggatgatttgatttgccaggtggaggtctttggctttaatctagcagccttggatattcgccaagaaagtacctgtcacgctgaggccctcaatgaaattaccgcctatttgggtattctcccctgtccctatacagaactctcagaagccgaacgcacccgctggctcctcagtgaactctcgacccgtcgccccttgattccaggggaactcccctttagcgatcgcaccaatgaaatcattgaaacattccgcatggtgcggcaactccagcaggaatttggcaccgatttgtgcaatacctacatcatcagcatgagccatgaggtcagcgatctgttggaggtactcctctttgctaaggaggcaggcctttttgatccagccactggcgctagtaccctgcaagccattcccctgtttgaaacggtggaggatctcaagcacgccccagcggtgctgacccaactattctctctccccttttgccggagctatcttggaagcaacagtaccccctttctgcaggaggtcatgctgggctattccgacagcaataaggattcgggcttcctcagtagcaactgggaaatttataaggcacaacaacagctgcagaaaattgctgagagttttggcttccaactgcgcattttccacggtcggggtggttcagtgggtcggggtggtggacctgcctatgcggcgattttggcacagccagcacaaacgattaagggacgaatcaagattactgagcagggggaggtactggcttccaaatactcgttgccggaactcgcgctctttaacctcgaaacagtggccacagcggtcatccaagctagtttgctccgcagtagtattgatgagattgagccttggcacgagattatggaggagttggctacgcgatcgcgccagtgctatcgccatctcatctatgagcagccagaattcattgaattctttaacgaagtcaccccaatccaagagattagccaactgcaaattagctcacggccaacacggcggggggggaagaaaacccttgagagcctgcgggcaattccttgggtctttagttggacgcaaacccgtttcctgctgccggcttggtatggcgtgggtactgccctgaaggaattccttgaggaaaaacccgctgagcatctctccctcttgcgctacttctactataagtggcctttcttccgcatggtgatctctaaggttgagatgacccttgccaaggttgatctagagattgcccgctactatgtccaagaactcagccagccccaaaaccgtgaagccttctgccgcctctacgatcagattgctcaggaatatcgcctgaccacggaattagtcctcacgattactggccatgagcggctactcgatggggatccggcgcttcagcgatcggtgcaactgcgcaatcgcaccattgttcctttgggcttcctgcaagtatctcttttgaaacggctgcgccagcacaatagccaaaccacctctggggcaattttgcgctcccgctatggtcggggtgaattgctacggggggcactcttgaccatcaatggcatagcagcggggatgcgcaatacaggctaagcaacggcgagggtgaatcatggacccgacgacccgc

SEQ ID NO: 10 - protein, 1011 aa, Thermosynechococcus vulcanus
MTSVLDVTNRDRLIESESLAARTLQERLRLVEEVLVDVLAAESGQELVDLLRRLGALSSPEGHVLHAPEGELLKVIESLELNEAIRAARAFNLYFQIINIVEQHYEQQYNRERAAQEGLRRRSVMSEPISGVSGEGFPLPHTAANATDVRSGPSERLEHSLYEAIPATQQYGSFAWLFPRLQMLNVPPRHIQKLLDQLDIKLVFTAHPTEIVRQTIRDKQRRVARLLEQLDVLEGASPHLTDWNAQTLRAQLMEEIRLWWRTDELHQFKPEVLDEVEYTLHYFKEVIFAVIPKLYRRLEQSLHETFPALQPPRHRFCRFGSWVGGDRDGNPYVKPEVTWQTACYQRNLVLEEYIKSVERLINLLSLSLHWCDVLPDLLDSLEQDQRQLPSIYEQYAVRYRQEPYRLKLAYVLKRLQNTRDRNRALQTYCIRRNEAEELNNGQFYRHGEEFLAELLLIQRNLKETGLACRELDDLICQVEVFGFNLAALDIRQESTCHAEALNEITAYLGILPCPYTELSEAERTRWLLSELSTRRPLIPGELPFSDRTNEIIETFRMVRQLQQEFGTDLCNTYIISMSHEVSDLLEVLLFAKEAGLFDPATGASTLQAIPLFETVEDLKHAPAVLTQLFSLPFCRSYLGSNSTPFLQEVMLGYSDSNKDSGFLSSNWEIYKAQQQLQKIAESFGFQLRIFHGRGGSVGRGGGPAYAAILAQPAQTIKGRIKITEQGEVLASKYSLPELALFNLETVATAVIQASLLRSSIDEIEPWHEIMEELATRSRQCYRHLIYEQPEFIEFFNEVTPIQEISQLQISSRPTRRGGKKTLESLRAIPWVFSWTQTRFLLPAWYGVGTALKEFLEEKPAEHLSLLRYFYYKWPFFRMVISKVEMTLAKVDLEIARYYVQELSQPQNREAFCRLYDQIAQEYRLTTELVLTITGHERLLDGDPALQRSVQLRNRTIVPLGFLQVSLLKRLRQHNSQTTSGAILRSRYGRGELLRGALLTINGIAAGMRNTG

SEQ ID NO: 11 - DNA, 2736 bp, Streptomyces coelicolor
gtgagcagtgccgacgaccagaccaccacgacgaccagcagtgaactgcgcgccgacatccgccggctgggtgatctcctcggggagaccctggtccggcaggagggccccgaactgctggaactcgtcgagaaggtacgccgactcacccgagaggacggcgaggccgccgccgaactgctgcgcggcaccgaactggagaccgccgccaagctcgtccgcgccttctccacctacttccacctggccaacgtcaccgagcaggtccaccgcggccgcgagctgggcgccaagcgcgccgccgagggcggactgctcgcccgtacggccgaccggctgaaggacgccgaccccgagcacctgcgcgagacggtccgcaacctcaacgtgcgccccgtgttcaccgcgcaccccaccgaggccgcccgccgctccgtcctcaacaagctgcgccgcatcgccgccctcctggacaccccggtcaacgagtcggaccggcgccgcctggacacccgcctcgccgagaacatcgacctcgtctggcagaccgacgagctgcgcgtcgtgcgccccgagcccgccgacgaggcccgcaacgccatctactacctcgacgagctgcacctgggcgccgtcggcgacgtcctcgaagacctcaccgccgagctggagcgggccggcgtcaagctccccgacgacacccgccccctcaccttcggcacctggatcggcggcgaccgcgacggcaaccccaacgtcaccccccaggtgacctgggacgtcctcatcctccagcacgagcacggcatcaacgacgccctggagatgatcgacgagctgcgcggcttcctctctaactccatccggtacgccggtgcgaccgaggaactgctcgcctcgctccaggccgacctggaacgcctccccgagatcagcccccgctacaagcgcctcaacgccgaggagccctaccggctcaaggccacctgcatccgccagaagctggagaacaccaagcagcgcctcgccaagggcaccccccacgaggacggccgcgactacctcggcaccgcccagctcatcgacgacctgcgcatcgtccagacctcgctgcgcgaacaccgcggcggcctgttcgccgacgggcgcctcgcccgcaccatccgcaccctggccgccttcggcctccagctcgccaccatggacgtccgcgagcacgccgacgcccaccaccacgccctcggccagctcttcgaccggctcggcgaggagtcctggcgctacgccgacatgccgcgcgagtaccgcaccaagctcctcgccaaggaactgcgctcccgcaggccgctggcccccagccccgcccccgtcgacgcgcccggcgagaagaccctcggcgtcttccagaccgtccgccgcgccctggaggtcttcggccccgaggtcatcgagtcctacatcatctccatgtgccagggcgccgacgacgtcttcgccgcggcggtactggcccgcgaggccgggctgatcgacctgcacgccggctgggcgaagatcggcatcgtgccgctgctggagaccaccgacgagctgaaggccgccgacaccatcctggaggacctgctcgccgacccctcctaccggcgcctggtcgcgctgcgcggcgacgtccaggaggtcatgctcggctactccgactcctccaagttcggcggcatcaccaccagccagtgggagatccaccgcgcccagcgccggctgcgcgacgtcgcccaccgctacggcgtacggctgcgcctcttccacggccgcggcggcaccgtcggccgcggcggcggccccacccacgacgccatcctcgcccagccctggggcaccctggagggcgagatcaaggtcaccgagcagggcgaggtcatctccgacaagtacctcatccccgccctcgcccgggagaacctggagctgaccgtcgcggccaccctccaggcctccgccctgcacaccgcgccccgccagtccgacgaggccctggcccgctgggacgccgcgatggacgtcgtctccgacgccgcccacaccgcctaccggcacctggtcgaggaccccgacctgccgacctacttcctggcctccaccccggtcgaccagctcgccgacctgcacctgggctcgcggccctcccgccgccccggctcgggcgtctcgctcgacggactgcgcgccatcccgtgggtgttcggctggacccagtcccggcagatcgtccccggctggtacggcgtcggctccggcctcaaggccctgcgcgaggcgggcctggacaccgtgctcgacgagatgcaccagcagtggcacttcttccgcaacttcatctccaacgtcgagatgaccctcgccaagaccgacctgcgcatcgcccagcactacgtcgacaccctcgtcccggacgagctcaagcacgtcttcgacaccatcaaggccgagcacgagctcaccgtcgccgaggtcctgcgcgtcaccggcgagagtgaactgctggacgccgacccggtcctcaagcagaccttcaccatccgcgacgcctacctcgaccccatctcctacctccaggtcgccctcctcggccgtcagcgcgaggccgccgccgcgaacgaggacccggaccccctcctcgcccgagccctcctcctcaccgtcaacggcgtggcagcgggcctgcgcaacaccggctga

SEQ ID NO: 12 - protein, 911 aa, Streptomyces coelicolor
MSSADDQTTTTTSSELRADIRRLGDLLGETLVRQEGPELLELVEKVRRLTREDGEAAAELLRGTELETAAKLVRAFSTYFHLANVTEQVHRGRELGAKRAAEGGLLARTADRLKDADPEHLRETVRNLNVRPVFTAHPTEAARRSVLNKLRRIAALLDTPVNESDRRRLDTRLAENIDLVWQTDELRVVRPEPADEARNAIYYLDELHLGAVGDVLEDLTAELERAGVKLPDDTRPLTFGTWIGGDRDGNPNVTPQVTWDVLILQHEHGINDALEMIDELRGFLSNSIRYAGATEELLASLQADLERLPEISPRYKRLNAEEPYRLKATCIRQKLENTKQRLAKGTPHEDGRDYLGTAQLIDDLRIVQTSLREHRGGLFADGRLARTIRTLAAFGLQLATMDVREHADAHHHALGQLFDRLGEESWRYADMPREYRTKLLAKELRSRRPLAPSPAPVDAPGEKTLGVFQTVRRALEVFGPEVIESYIISMCQGADDVFAAAVLAREAGLIDLHAGWAKIGIVPLLETTDELKAADTILEDLLADPSYRRLVALRGDVQEVMLGYSDSSKFGGITTSQWEIHRAQRRLRDVAHRYGVRLRLFHGRGGTVGRGGGPTHDAILAQPWGTLEGEIKVTEQGEVISDKYLIPALARENLELTVAATLQASALHTAPRQSDEALARWDAAMDVVSDAAHTAYRHLVEDPDLPTYFLASTPVDQLADLHLGSRPSRRPGSGVSLDGLRAIPWVFGWTQSRQIVPGWYGVGSGLKALREAGLDTVLDEMHQQWHFFRNFISNVEMTLAKTDLRIAQHYVDTLVPDELKHVFDTIKAEHELTVAEVLRVTGESELLDADPVLKQTFTIRDAYLDPISYLQVALLGRQREAAAANEDPDPLLARALLLTVNGVAAGLRNTG

SEQ ID NO: 13 - DNA, 3481 bp, Rhodopseudomonas palustris
ctgcaggtgacgcgccagctcagcggccttgccgccgcgctcggcgtgctgaccctgctggcgctcggcaccttcacggccggtttgcacatccgcgcctggaagatcgcggtggtcggcgtcatccttggcgtcagcgtcccggcgatcgccttcctgcagcaatcggcgctgctgatcctgctggtgatcggcctgatcatcgccatcgtggtgccgttcgtttgggccaagcgccggcccgcgccggcttcggagccgttattccagccgccgttcacccgcaccaccacgccgccgacctcggccagctcgcggccggtgccgcagccgccgctgtacgaaacgccggtcgcggccccgatgccggtcgcgccgccgccggccccgacgcccagcgctgccgagccggcctcgccgccgccgccggcggacagcaacacgccgccggacaacgtccgcaacatctcgggcgcgcgctaactacgcttcgaccggcccgcgcgacgtgcaccgccgattcttgatcttgcgtgcggtgccaaaatccttcaggataccgatctgatcctggagtgctgcgatgtcgtcgttgaacctgtccgccggtcctgagccggtttccgaacgtcctgacgacgcggccgcgatcgaggccgagacccggctgcgcaacgacatccggctgctcggccggatcctcggcgacactgtgcgcgagcaggaaggacagaccgtgttcgatctggtcgagaacatccgccagacctcgatccgattccaccgcgacgacgacaagaccgcacgcgccgagctcgaagccatcctggacgggatgtcgatccccgacacgatgcggatcgttcgcgccttcagctatttctcacacctcgccaacatcgccgaagaccagaacaacatccgccagatgcgcgccggctcgaccgcgggctcggcgccgcgtgccggactgctcgccaagacgctggcgcacgcgcggcaggaaggcatcagcgccgcggagctgcgcaagttctttgcgaccgcgctggtgagcccggtgctgaccgcgcatccgaccgaagtgcgccgcaagagcacgatggaccgcgaaatgcagatcgcttcgctgctcgatcagcgcgaccgcgttcagctcaccgccgacgaatgggccgacaacgaggagcggctgcgccgcgccgtcgagacgctgtggaagaccaacctgctgcgccggacaaagctgacggtgctggatgaagtcaccaacggcctgtcgttctacgactacaccttcctgcgcgaggtgccgcggctgcacagtgcgctggaagaccggcttgccgatgcggccaaggccgaaggcgtcaacagcgacggcgagctggcgagcttcctgcggatgggaagctggatcggcggcgatcgcgatggcaatccgttcgtcactgccgaggtgctgcacggcaccttgaagctgcagagcacgcgcgtgctgcgctattatctcgacgagctgcacgagcttggctcggagttgtcgctggcgtcgcatctcgccggcaccaccgacaccgtcaaggcgctggccgaaacctcgcccgacacctcaccgcatcgcaaatacgagccgtatcgcctcgcggtgtccggcatctacgcgcggctggcagcgaccgcgctcaagctcgaggtcgagaacctccgcgcgccggtcggcgaggccgagccttacgccagcgcgcaggacttcaaagccgatctcgacgcgatccatctgtcgctcacccagcacaattccggtgtgatcgcgcgcggccggctgcgccagctccgccgcgcgatcgactgctttggcttccatctcgccagcctcgacatgcggcagaactcggcggtgcacgagcgcaccattaccgagctgatggacgcggcgcggcccggcacctcctatgcgatgctcgacgaggaagcgcggatcgcgctcttgatcagcgagctgcgcagcacccggccgctgacctcgatgttcgtcaaatacagcgacgagacggtcggcgagcttgcagtgttccgcgaagccgcgaaggcgcacgcgacctacggggcggcggcgatcccccaatgcatcatctcgatgaccaagggcgtttccgacctcttggaggtcgcggtgctgctcaaggaagtcgggctgatcgatccgtcggggcgcagcgccatcaacgtggtgccgctgttcgagaccatcgaggacctgcaggcctgcgccaagatcatggaccggctgctgtcgatcccggaatatcgccggctggtcgacagccgcggctcggtgcaggaggtgatgctcggctactccgacagcaataaggacggcggcttcgtcacctcgggctgggagctgtacaaggccgagatcggactgatcgagatcttcgagcaccatggcgtgcggttgcggctgttccacggccgcggcggctcggtcggccgcggcggcggcccgagctacgacgccatcgtggcgcagccgggtggggcggtgaacggccagatccgcatcaccgagcagggcgagatcatcaccaggaaatattccaacgtcgaagtcggccgcaacaacctcgagatcctcgccgccgcgacgttggaagcaagcctgctgcagccgaagcgggtggcgccgcatcgcgattatctcgaggcgatggagcagctctccgcgctcgccttcaaggcgtatcgcggcctggtgtacgagaccgacggattcgtcgactacttctgggcctcgacggtgatcaacgagatctcgacgctgaacatcggcagccgtccggcctcgcgcaagaaaacgcgcgcgatcgaggacctgcgcgcgatcccctgggtattctcgtgggcgcagtgccggctgatgctgccgggctggtacggtttcggcagcgcggtgtcggcctgggtcaccgcgcatcccgagacgggcatcgccttcctgcaaaagatgtatcaggagtggccgttctttcgcacgctgctgtcgaacatggacatggtgctgtcgaagagctcgatcggcatcgcctcgcgatatgccgagctggtggaggacgtcgatgttcgcgagcgcatcttcggccgcatccgcgccgaatggcattcctcgatcgagtatctgttcgcgatcatgcagcaggaccgcctgctgcagagcaacccgctgctcgaacgctcgatccgccaccgcttcccgtatctcgaccccctgaaccacgtccaggtccagctgctgcgcgaacaccgcacccacgacccagacgaacaggtgctccgcggcgtgcaactgacgatcaacgggatttcggcggggctgcggaatagcgggtgagggcgggccgccgctgggattggattgggctgatttagccggtggaaaggcgcgcctgttagattggcggcgatgctgaagcgggcg

SEQ ID NO: 14 - protein, 936 aa, Rhodopseudomonas palustris
MSSLNLSAGPEPVSERPDDAAAIEAETRLRNDIRLLGRILGDTVREQEGQTVFDLVENIRQTSIRFHRDDDKTARAELEAILDGMSIPDTMRIVRAFSYFSHLANIAEDQNNIRQMRAGSTAGSAPRAGLLAKTLAHARQEGISAAELRKFFATALVSPVLTAHPTEVRRKSTMDREMQIASLLDQRDRVQLTADEWADNEERLRRAVETLWKTNLLRRTKLTVLDEVTNGLSFYDYTFLREVPRLHSALEDRLADAAKAEGVNSDGELASFLRMGSWIGGDRDGNPFVTAEVLHGTLKLQSTRVLRYYLDELHELGSELSLASHLAGTTDTVKALAETSPDTSPHRKYEPYRLAVSGIYARLAATALKLEVENLRAPVGEAEPYASAQDFKADLDAIHLSLTQHNSGVIARGRLRQLRRAIDCFGFHLASLDMRQNSAVHERTITELMDAARPGTSYAMLDEEARIALLISELRSTRPLTSMFVKYSDETVGELAVFREAAKAHATYGAAAIPQCIISMTKGVSDLLEVAVLLKEVGLIDPSGRSAINVVPLFETIEDLQACAKIMDRLLSIPEYRRLVDSRGSVQEVMLGYSDSNKDGGFVTSGWELYKAEIGLIEIFEHHGVRLRLFHGRGGSVGRGGGPSYDAIVAQPGGAVNGQIRITEQGEIITRKYSNVEVGRNNLEILAAATLEASLLQPKRVAPHRDYLEAMEQLSALAFKAYRGLVYETDGFVDYFWASTVINEISTLNIGSRPASRKKTRAIEDLRAIPWVFSWAQCRLMLPGWYGFGSAVSAWVTAHPETGIAFLQKMYQEWPFFRTLLSNMDMVLSKSSIGIASRYAELVEDVDVRERIFGRIRAEWHSSIEYLFAIMQQDRLLQSNPLLERSIRHRFPYLDPLNHVQVQLLREHRTHDPDEQVLRGVQLTINGISAGLRNSG

SEQ ID NO: 15 - DNA, 2832 bp, Welwitschia mirabilis
  misc_feature (1741)..(1743): n is a, c, g, or t
agcatcgacgcgcaactgcggcttttggtcccaacgaaggtttccgaagatgataagcttattgagtatgacgctcttctgatggaccgctttctggatatcttgcaagacctacatggagaagaaattagagaaacggttcaagagtgctatgagctttcaggagaatacgaaggaaagtttgacacggcaaagttggaggagcttggaggagtgttaacaagtctagatgctggagactccattgttgttgcagctctttctcacatgcttaacctagcgaacttggctgaggaggttcagatagcataccgaagacgaattaaacacaaaaagaaaggggatttcgcggatgagaattccgcaacgacggaatcagacattgaagaaacctttaaaaggcttgtaaatcagcttggaaggtctcctcaagaagtttttgacgctctcaaaaatcaaacaattgatttggtcttgactgcacatccaacgcatcagtcggtatccctgctacaaaagcatggcaggatccgaaactgcttgtctcagttgtatgcgaaagacattacgcccgatgaaaaacaggagcttgatgaagctttacagagggagattcaagctgccttcagaactgatgaaattcggcgcactcctcccacccctcaagatgagatgcgagcaggaatgagttatttccatgaaaccatatggaaaggtgtccctaagttcttacgtcgtgttgacactgctctaaagtcgattggtataaatgagagacttccttacaatgcccccctaatacaattctcgtcgtggatgggcggcgaccgcgacgggaatcctagagtcactccagaagtcacgcgagacgtttgtctccttgcgaggatgatggctacaaatttatactactctcagatagaggaccttatgtttgagttgtcaatgtggcgatgtagcgatgagcttcggcaacgtgctctgcagcttcataattctgcaaagagagatgcaaaacattacatagagttttggaagcaagtacctcccaatgagccatttagggtaattttgggagatgttagggacaagttatataacactcgggaacgcactcgccagttgcttgccaatggtttctcagatgtgccagaagaagcacttacgagtgtagatcagttgttggaaccgttagagttgtgctatcgatctctgtgctctaccggcgatcaacccattgcagatggcagtcttcttgatttcatgcgtcaagtctcaacctttggcttaactcttgtgaagttggatattagacaagaatcagatcgacacactgatgttatcgacgcaataacaagacatctaggccttgggtcctataaagagtggccagaagacaaacgacaggagtggctgttggctgaactacgtggaaaacgtccactatttggacccgaccttccaactacagatgaaataagagaagttcttgacacattccacgtggtagctgaacttcctccagacaactttggagcttacatcatatcaatggctactgctccttcagatgttttagtcgttgagttactgcagagggaatgccgtgtgaaaaagcctctgcgagttgtgcctttgtttgagaagcttgctgatttagagaatcgtcccgcggctttggcaaggctgttctcaattgattggtatagaaacagaattgatggaaagcaagaagtaatgnnnggttactcagactccggcaaggatgccggaagactatctgcagcatggcaattatacaaggctcaagaggaattgatcaaggttgcaaaacagtttggaattaagctgacaatgtttcatggtcgtggagggaccgttggaagaggaggtggtccaacccatctggctatattatctcaacctccagacacaattcacgggtcattgcgagttaccgtccaaggggaggttattgagcagtgttttggggaggaacatctgtgtttccgaactcttcagcgctttactgctgccacattggaacatggaatgcatcctccaattgcacctaagcccgaatggcgtcaactgatggatgaaatggctgttgttgctactcaagagtataggtcttatgttttccacaacaagagatttgtggagtatttccgatccgcaactcccgagttggagtatggacggatgaatataggcagtcgtccatcaaaaagaaagcccagtggaggcattgaatcacttcgtgcaattccatggatatttgcttggacacagaccagattccatcttcctgtttggcttggatttggtgctgctttcaagagtgttatcgagaaggacattcgaaatcttcacacgctgcaacaaatgtataacgaatggccatttttccgtgtcaccattgacctagttgaaatggtgtttgccaagcaccctgaaattgctgcattatacgataaactgcttgtatcatcagtcttgtgggctttcggggaacaactaagaaaaaactatgtagagactaagacccttctgctgcaggttgctggacacaaagaagtcttagaaggcgacccatatctgaaacaacgattgagacttcgtgactcatatatcacaaccttgaatgcacttcaggcatatactttaaaacggatacgagatccaagctaccatgtcaccctcaggcctcatttatctaaagaaagctcaaccaagccagcagcagaattggtaaaattaaacccaaccagtgagtatgcaccgggattagaagatacattgatcttaaccatgaagggcattgctgcc

SEQ ID NO: 16 - protein, 944 aa, Welwitschia mirabilis
  UNSURE (581)..(581): Xaa can be any naturally occurring amino acid
SIDAQLRLLVPTKVSEDDKLIEYDALLMDRFLDILQDLHGEEIRETVQECYELSGEYEGKFDTAKLEELGGVLTSLDAGDSIVVAALSHMLNLANLAEEVQIAYRRRIKHKKKGDFADENSATTESDIEETFKRLVNQLGRSPQEVFDALKNQTIDLVLTAHPTHQSVSLLQKHGRIRNCLSQLYAKDITPDEKQELDEALQREIQAAFRTDEIRRTPPTPQDEMRAGMSYFHETIWKGVPKFLRRVDTALKSIGINERLPYNAPLIQFSSWMGGDRDGNPRVTPEVTRDVCLLARMMATNLYYSQIEDLMFELSMWRCSDELRQRALQLHNSAKRDAKHYIEFWKQVPPNEPFRVILGDVRDKLYNTRERTRQLLANGFSDVPEEALTSVDQLLEPLELCYRSLCSTGDQPIADGSLLDFMRQVSTFGLTLVKLDIRQESDRHTDVIDAITRHLGLGSYKEWPEDKRQEWLLAELRGKRPLFGPDLPTTDEIREVLDTFHVVAELPPDNFGAYIISMATAPSDVLVVELLQRECRVKKPLRVVPLFEKLADLENRPAALARLFSIDWYRNRIDGKQEVMXGYSDSGKDAGRLSAAWQLYKAQEELIKVAKQFGIKLTMFHGRGGTVGRGGGPTHLAILSQPPDTIHGSLRVTVQGEVIEQCFGEEHLCFRTLQRFTAATLEHGMHPPIAPKPEWRQLMDEMAVVATQEYRSYVFHNKRFVEYFRSATPELEYGRMNIGSRPSKRKPSGGIESLRAIPWIFAWTQTRFHLPVWLGFGAAFKSVIEKDIRNLHTLQQMYNEWPFFRVTIDLVEMVFAKHPEIAALYDKLLVSSVLWAFGEQLRKNYVETKTLLLQVAGHKEVLEGDPYLKQRLRLRDSYITTLNALQAYTLKRIRDPSYHVTLRPHLSKESSTKPAAELVKLNPTSEYAPGLEDTLILTMKGIAA

SEQ ID NO: 17 - DNA, 4776 bp, Chlamydomonas reinhardtii
atgacggactccacatatgattttggagccgtgagggacgatctgacgccgcttgaggatgactgcaagcttctcggtagcctgcttgacgactgtctccgcgtcgaaatcggcgagaccatgttcaagaagattgaacgcatccgagcactggcgcaatgtgcctcaaatctgtcgatcaagggagacgcgggcgcctccgacatgctgtcgcaccggctggcggaggagctgatgaacctggacatggacgaggcggtgccgctcacacgcgcctgcggccactacctcaacctgtccggcatcgcagagctgcaccacggagtgcgccgcgaccgcgccactcgcgagcccaaccccaacagctgcgacgcggtgtttgcgcggctgatcacggagggcgtggaccccgaggagctgtaccgggcggtgtcggagcagaacgtggaggtggtgctcaccgcgcaccccacacaggtgaaccggcgcacgctgcagtacaagcacactcgcattgcggcgctgctgcagcagcacgaccgctccgacctgacggcggaggagcggcgcaacatggtgagcgagctgcagcgggaggtggcggcgctgtggcagacggacgagctgaggaggcagaagcccacgccgctggacgaggcgcgcggcggtctgcacattgtggagcagtcgctgtgggccgcggtgccgcagtacatgcgccgcctcagcgccgcgctcaagaaacacaccgggcacgacctgccgctgcaggccacgcccttccgcttcggcagctggatgggcggcgaccgcgatggcaaccccaacgtgaccgccaaggtgacggcgcacgtgacggccctggcgcgctggatggcggcggatctgtacctgcgtgagatcgacacgctgaggtttgagctgtccatgaaccagtgcagtgcggcggtgtggaagatggcccgccgcatcatcgccgagggccacaccaagcgcgccggcgtggtccgggccaaggccgccgccgccctgcaccagaccgcaacagacgcagccagccatggcggctccgccgcctcggcggccgccgccgccgccgcaggcggcgacgtcgtcgctgacggcaccagcggcggcggcgctgccgccgccgccggccccgccgccgctgccgcggcggacgacgcgttcaccttcagccggttggggcggccccggccggagcggccgagcacggacgtgcggagtgtgggcgtgctggcgggcggcgagggcgcggcgttcccgggcggcatgatcctgggcacgcagccggtgtcggcgcacacggcggcggaggtgtcggtgccgcacgagctgccgggacaggacgtggagggcggctcggagatggacttcaacgagtcccgccgcgcctcggacgccggagacctgggcgcctcgcagcaccccatgctgggcgggccctccgccggcgcctccgccgagcccaccgcccacggctacaccaccaccgccaccgccgccgccgccgccgccgacggcacgcagcccgagcccgaagtccccggcacgcccagctacgccgaccccggcacccccgaccgccttggcgcgctgcccggccccttcacgcccggccccacgcccttccgcgaggcggccaacgccgccatgagcaccgccgccagcggcggcgcgggcggcggcggcggcggcggcgcgaaccgcgcggcctcgggcctgggcggcgaccccaccttcacgcgtcgcagcctgatggcgcagcggctgggaaccagctcggtgcagttcgcgcgcgcgcacgagcaccccggcttccacccctaccgcatcgtgttgggccacgtgcgcgacaggctggcggccacgcggcggcgcatggaggacctgctgagcggccgcgagccggcgggcgaggcgcacggcggcgtgggggcgggcggcggcggcggcggcggcgcggcgccgtggtatgagagcgaggacgagctggcggagccgctgatggcgtgctactggtcgctgtgggagtgcggcggcggcgtcattgcggacgggcggctgctggacctcatccgccgcgtgtacaccttcggcatgtgcctcatgaagctagacctgcgccaggagtccacccgccacgccgaggccctggacgccgtgaccagctacctgggtctgggctcctacctggagtggagcgaggaccagaaaatcgagtggctcacaaaggagctgcagggccggcggccgctcatccccgccgacatgcccatgagcgccgaggtgcgcgaggtgctggacaccttcaaggtggccgcccatctgggccgtgacaacctgggcgcctacgtcatctccatgaccaagggcgcctcggacgtgatggcggtggagctgctgcagcgcgaggcgcgcatgcaggtgggcgccgaggcgggcggccgcggcggcggcgggcccgaggacggcggctcgctgcgcgtggtgccgctgttcgagacgctggaggacctggacgcggcggaggacgtgatgacgcggctgctgaccaacccctggtaccgcgagcacctgcgggcagtgcacggcgacgcgcaggaggtgatgctgggatacagcgacagcggcaaggacgccggccgcctggctgccaactgggcgctgtacaagtgtcaggagcggctggtggccatcaccaaggccaacaacgtcaagctcacgctgttccacggccgcggcggcaccgtgggccgcggcggcgggcccacccacatcgccatccagtcgcagccgcccggctctgtggaggggaccttccgcatcaccgagcagggcgagatggtccaggccaagttcggcatcagcggcgtggctctgagccagctggagacctacaccaccgctgtgctgctggccaccatgcgcccgcccagcccgccgcgccgcgaggagtggcgcgccgtgatggagatgctcagccgcgtcagctgcgagagctaccgcaacatcgtgcaccacagcccgctcttcctgcgctacttcaagcacgccacgcccgaggccgagctgggcaacctctacatcggctctcgcccggctcggcggcgcaacaaggacgcctccatctccacgctgcgcgccatcccctggatcttcgcctggacgcagaaccgcctcatcctgccctcctggctgggcattggcgccgccctcaccgcggccatgacccagggccacctgcccacgctgcaggccatgtaccgcgagtggcccttcttcggatccacagtggatctgattgagatgatcctggccaagaccgacccgcgcatcgcggcgctgtacgaggaggtgctggtcaacgaccccgaggagaagaagctgggagccgagctgcgcgagcggctgcagcgctgccagggcgccatcctcaaggtgaccgggcacgagaacctgctgtccaacaaccccacattgagcaagctcatctccatgcgctcgcccttcgtggaccccatcaacatcctgcaggtggaggtgctgcggcgcctgcgccaggaccccaacaacatgcgcctgcgcgacgcgctgctcatctccatcaacggcatcgccgccggcatgcgcaacaccggctaagcagcggcggcgctgctgctggtgatggaggtggaggtggagatggacgtggtgcgcaccaggcacaaggcggaggcaggtgccagtggaggtggggcgtcccgggcggaggcatgagcggcgtcgacggctggcgccgcggtatgatgtgctgcggcacgagcgacggcacgtgcggtctaaagctgctggatgtgcttggcacggcgcgcaagaggggtgtgctgggggcggaggtggtgctgaaaatgtttggttagttggttggatgtttgggctagctggtgcgctggagcgggtaaggcaagtggtgggtggggtatgcgggtgcgctggggtgtccagggcggctgcgatcaatgcgggttggtgggcaaccccgtcccggcgctgaatcgctgcgtggatctgacctttgcggaattcctgcctgccttccgcgcctggcaatttaggaactcgtttgagcgtttgacgttgtcctagggcggcatgaccgagcatcgcgtgcatggcagcggggctgcgatcgcgcgtggtgagccacagacgttgatagtgatatttgaggcagcccagaacgcatggcggaatggcgtggtctttgagagctgagtgtgtcagactggcatagggcgctgtggctgactaacgtcccgcacgtgtgcgactgcagaccatgtttgcaggggcaggtactttacttgatgtgcatggcattctcacataaagctccgaaggatcatttgtggcgcaccaaccagagacctagcccagagcagagtgtcagcagcgatatcaaagtcattttgtgggtggttgtctgggtactccgaggcgcgtacgttgagcgcgtgctcgctgcataccgcatacggaatcggataagtgaaaggaggtcacatggccaggggctgcagatgctggtgagggctgcctgcctaagcggcgtgtccgggacggcagggaagcacgcatgccattcgacgtgtgcggtgcaaatgagaccgtggagtcctcgggcagggcttgacagcacaagcgtggagcgcgcacacagcgcacagactatgttttccttgtgctctttaacacagcgcacagaaaaaa

SEQ ID NO: 18 - protein, 1221 aa, Chlamydomonas reinhardtii
MTDSTYDFGAVRDDLTPLEDDCKLLGSLLDDCLRVEIGETMFKKIERIRALAQCASNLSIKGDAGASDMLSHRLAEELMNLDMDEAVPLTRACGHYLNLSGIAELHHGVRRDRATREPNPNSCDAVFARLITEGVDPEELYRAVSEQNVEVVLTAHPTQVNRRTLQYKHTRIAALLQQHDRSDLTAEERRNMVSELQREVAALWQTDELRRQKPTPLDEARGGLHIVEQSLWAAVPQYMRRLSAALKKHTGHDLPLQATPFRFGSWMGGDRDGNPNVTAKVTAHVTALARWMAADLYLREIDTLRFELSMNQCSAAVWKMARRIIAEGHTKRAGVVRAKAAAALHQTATDAASHGGSAASAAAAAAAGGDVVADGTSGGGAAAAAGPAAAAAADDAFTFSRLGRPRPERPSTDVRSVGVLAGGEGAAFPGGMILGTQPVSAHTAAEVSVPHELPGQDVEGGSEMDFNESRRASDAGDLGASQHPMLGGPSAGASAEPTAHGYTTTATAAAAAADGTQPEPEVPGTPSYADPGTPDRLGALPGPFTPGPTPFREAANAAMSTAASGGAGGGGGGGANRAASGLGGDPTFTRRSLMAQRLGTSSVQFARAHEHPGFHPYRIVLGHVRDRLAATRRRMEDLLSGREPAGEAHGGVGAGGGGGGGAAPWYESEDELAEPLMACYWSLWECGGGVIADGRLLDLIRRVYTFGMCLMKLDLRQESTRHAEALDAVTSYLGLGSYLEWSEDQKIEWLTKELQGRRPLIPADMPMSAEVREVLDTFKVAAHLGRDNLGAYVISMTKGASDVMAVELLQREARMQVGAEAGGRGGGGPEDGGSLRVVPLFETLEDLDAAEDVMTRLLTNPWYREHLRAVHGDAQEVMLGYSDSGKDAGRLAANWALYKCQERLVAITKANNVKLTLFHGRGGTVGRGGGPTHIAIQSQPPGSVEGTFRITEQGEMVQAKFGISGVALSQLETYTTAVLLATMRPPSPPRREEWRAVMEMLSRVSCESYRNIVHHSPLFLRYFKHATPEAELGNLYIGSRPARRRNKDASISTLRAIPWIFAWTQNRLILPSWLGIGAALTAAMTQGHLPTLQAMYREWPFFGSTVDLIEMILAKTDPRIAALYEEVLVNDPEEKKLGAELRERLQRCQGAILKVTGHENLLSNNPTLSKLISMRSPFVDPINILQVEVLRRLRQDPNNMRLRDALLISINGIAAGMRNTG

SEQ ID NO: 19 - DNA, 3099 bp, Glycine max
atgactgacatcactggtgatattgctgaggaaatctccttccagagcttcgatgatgactgcaggttgcttggtaatctcctcaatgacattctccagcgtgaagttggcaccaacttgcttgacaagatcgaaaggactcgagtccttgctcagagtggttgtaatatgaggcaggcgggtattgtaaacatggcagagatgcttgagaagcagttggcttcggagttatcaaagatgacactagaagaagctttcacccttgctcgtgccttcagccattatcttactttgatgggtatagctgagacccaccatagggttcgtaaaggagggaatatggcacaaattgcaaaatcttgcgatgatatatttaaccagctggtgcagggtggagtccccccagaagaactttatgacacagtctgcaagcgggaggttgaaattgttctcactgctcatcccacacagattaaccgtcgaaccttacagtttaaacacattagaattgctcatcttttggattacaatgatcgacctgatcttagcactgaagatcgagaaatggtgattgaagatctggtgagagagataacttcaatatggcagacagatgagcttaggcgccagaaacccactccagttgatgaagctagagctggtttcaatattgtggagcagtcactctggaaagctgtccctcattatttacgtcgtgtcagcaatgcattaaagaagcatacaggaaagccacttcctttgacttgcactcccataaagtttggatcttggatgggaggtgatagagatggaaacccaaatgtgacagcaaaggtcacaaaagatgtttcacttctatctagatggatggcgattgacctctatattcgggaagtggatagcctcagatttgagctatccatgaaccagtgcagtgataggttgtcaagattggcacatgaaattctagaagccaagcatgagaatcgccgtgagaattggaatcagtctgcgaatagaagtctcacacttccaacacaacttccagctagagctcatttaccttctattgctgaaaatggtgaatctcggcatcccagactagacattccagcacctgattacatgcaatccaatcacaaggatggtggggtttctgtaagttcaactacatcaaaacttgccaatcccaatactcgattaccaggaacaagttcagcaaattccagtgcttcttcagctgcacttggtcaaaagaaattgtatgcagaatcccagacaggaaagtccacttttcaaaagcttttggagccaatgcttcctcaacttcctggaattgctccttatagaattgtcctggggaatgttaaggataagcttgagaaaagtcgtagacggttagaaattcttcttgaggatgttgcatgtgactatgatcctttggattactatgaaacatctgatcagcttttggaacctctgctcctctgttatgaatctctgcaatcgtgtggatctggggtgctagctgatggtcgacttgctgatctgattcgtagagttgctacctttggaatggtgttaatgaagcttgacttgcgtcaggaatctgggagacatgcagaagcacttgatgcaataacacagtacttagatatgggtacttacagtgaatgggatgaagaaaagaagttggacttcttaacaagagaacttaaagggaagaggcctcttgttcctgttagtatagaggttcatcctgatgttaaagaagtcttggatacattccgaattgccgctgaactggggagtgattcacttggagcttatgtgatctctatggcctcaaatgcaagtgatgtccttgcagtagagcttttacagaaggatgcacggcttgctgctattggggagttgggaaaagcatgtcctggtggaacgttgcgggttgtccctctgtttgaaactgtgaaagacctgagaggagctggttcagttatccggaaacttttatcaatagactggtaccatgaacacatcgttaagaaccataatggacatcaagaggttatggttggatattctgattctggtaaagatgctggtcgctttactgctgcttgggaactttacaaagctcaggaggatgttgtagctgcttgcaatgattatggaataaaggttactctattccatggtcgtggaggcagtattggtcgtggtggtggcccaacatatctggctattcagtcccaaccccctggctctgtgatgggaacgcttcggtctactgagcagggagagatggtagaggctaagtttgggttgccacagatagctgttagacaacttgagatatacacaacagctgtactacttgcaacccttcgtccacctatcccaccccgagaagaaaaatggcgtaatgtcatggaagagatctcaaacatcagttgtcagtgtgaccgcaatgtagtgtatgaaaatccagaattcctggcctacttccatgaagccacaccagaggcagaacttggcttccttaacataggtagccgccctacaagaaggaagagctcagtaggaatcggacaccttcgtgcaattccctggttatttgcatggacacaaacaagattcgttcttccagcttggcttggagtcggagcaggtttaaaaggagcttgcgagaaaggttacaccgaagagctaaaagccatgtacaaagaatggcccttctttcaaagtaccatagatcttattgagatggttttggggaaagctgacattcctatagccaagcactatgatgaagtccttgtgacaaaggagaggcaagagcttggccatgaactaagaagtgagctcatgacagctgaaaagtttgtcatggttattagtgggcacgagaaacttcagcagaataataggagcttgaggaggctaattgagaatagacttcccttccttaatcccttgaacatgttgcaggtggagatactcaagaggttaagacgtgatgatgacaaccgtaagatcagagatgctttgcttatcaccataaatgggattgctgcagggatgaagaatacaggttga

SEQ ID NO: 20 - protein, 1032 aa, Glycine max
MTDITGDIAEEISFQSFDDDCRLLGNLLNDILQREVGTNLLDKIERTRVLAQSGCNMRQAGIVNMAEMLEKQLASELSKMTLEEAFTLARAFSHYLTLMGIAETHHRVRKGGNMAQIAKSCDDIFNQLVQGGVPPEELYDTVCKREVEIVLTAHPTQINRRTLQFKHIRIAHLLDYNDRPDLSTEDREMVIEDLVREITSIWQTDELRRQKPTPVDEARAGFNIVEQSLWKAVPHYLRRVSNALKKHTGKPLPLTCTPIKFGSWMGGDRDGNPNVTAKVTKDVSLLSRWMAIDLYIREVDSLRFELSMNQCSDRLSRLAHEILEAKHENRRENWNQSANRSLTLPTQLPARAHLPSIAENGESRHPRLDIPAPDYMQSNHKDGGVSVSSTTSKLANPNTRLPGTSSANSSASSAALGQKKLYAESQTGKSTFQKLLEPMLPQLPGIAPYRIVLGNVKDKLEKSRRRLEILLEDVACDYDPLDYYETSDQLLEPLLLCYESLQSCGSGVLADGRLADLIRRVATFGMVLMKLDLRQESGRHAEALDAITQYLDMGTYSEWDEEKKLDFLTRELKGKRPLVPVSIEVHPDVKEVLDTFRIAAELGSDSLGAYVISMASNASDVLAVELLQKDARLAAIGELGKACPGGTLRVVPLFETVKDLRGAGSVIRKLLSIDWYHEHIVKNHNGHQEVMVGYSDSGKDAGRFTAAWELYKAQEDVVAACNDYGIKVTLFHGRGGSIGRGGGPTYLAIQSQPPGSVMGTLRSTEQGEMVEAKFGLPQIAVRQLEIYTTAVLLATLRPPIPPREEKWRNVMEEISNISCQCDRNVVYENPEFLAYFHEATPEAELGFLNIGSRPTRRKSSVGIGHLRAIPWLFAWTQTRFVLPAWLGVGAGLKGACEKGYTEELKAMYKEWPFFQSTIDLIEMVLGKADIPIAKHYDEVLVTKERQELGHELRSELMTAEKFVMVISGHEKLQQNNRSLRRLIENRLPFLNPLNMLQVEILKRLRRDDDNRKIRDALLITINGIAAGMKNTG

SEQ ID NO: 21 - DNA, 3159 bp, Ricinus communis
atgacggacaccacagatgatattgcagaggaaatctcatttcagagttttgatgatgattgtaagcttcttggcaatttgttaaacgatgttttgcagagagaagttggttctaaattcatggagaagcttgaacgcaatcgcatcctagctcagagtgcttgtaatatgagattggcggggatagaagataccgctgaattgctggagaagcagctggcattggagatatcaaggatgacattagaggaagcattgacacttgctcgtgcctttagtcattaccttaatttgatgggcattgctgagacccatcacagggttcgtaaggcacggagtatgacacatctatcaaaatcttgtgatgacatatttaatcagctgctgcagagtggcatatctgcagaggagctttatgacacagtttgcaagcaggaggttgaaattgtgctcactgcacatcctactcaaattaatcgtcgtaccttgcaatataagcacatcagaattgctcatcttttagattataatgaccggcctgatcttactcatgaagatcgagaaatgctgattgaagatctggtgagagaaattacttcaatatggcagacagatgagcttaggcgccacaagcctacaccagtagatgaagctagggctggcttgaacattgtggagcagtccctgtggaaagctcttccccattatttacgtcgtgtcagtactgccctaaagaagcatacaggaaagccacttcctttgacttgcacgccaataaggtttgggtcttggatggggggtgatagagatggtaatccgaatgtaacagcaaaggtcacaagagatgtttctcttttatctaggtggatggctgttgacctttacattcgagaagttgatagcctgagatttgaactatccatggttcaatgcagtgatagattgttgaaagtggcaaatgacattttaatagaagaaacttcatctgaagatcaccatgagagttggaatcaacctgcaagcagaagtcaaacaaagtttcctagaaaatctcttcctacacaacttccacctagagctgatcttcctgcttgcactgaatgtaatgatggtgaatctcagtatcccaaactagaacttccaggaactgattacatgccctttaatcgccaggaagctctaggttcttcatattcagaatcttcatcccaggatatcaatcatggtttacctaaaacaactggaaatggaagtgttgctaattctagtggatctccgcgggcatctttcagctctgctcaactggttgcacagaggaaactatttgcagaatccaagataggaagatctagcttccagaagcttctagaaccaagtctgcctcaacgtcctggaattgctccttatagaattgttcttggaaatgtaaaagataagcttatgaggacaagaagacgtctggaacttcttctagaggatcttccttgtgaatatgatcaatgggattactatgagacaacagatcaattattggatccactgcttctgtgctacgagtctcttcaatcatgtggagctggggttctagctgatggtcggctagctgacctgataagaagagttgctacatttgggatggtgttaatgaagctagacttgcgccaggaatctggtagacatgctgatactcttgatgcaatcaccaaatatttggaaatgggcacgtatagtgagtgggatgaagaaaagaagctggaatttctgacaagagaactgaaaggaaaacggccactggttcctcctactattgaggttgctcctgatgttaaagaagtcttggatgctttccgtgttgctgctgagctggggagtgattcacttggagcttatgtgatttctatggcatccaatgcaagtgatgtccttgctgtggagcttctgcagaaggatgcccggcttgctgttagtggggagctaggaagaccatgccctggtggaacgttgcgagtagttccgttgtttgaaactgtgaaagacctgagaggtgctggttcggtgatcagaaaactgttatcaattgactggtatagagaacacataattaagaaccataacgggcatcaggaggtgatggttggctattctgattctggtaaagatgctggacgctttactgctgcatgggaactttacaaagcccaagaggatgttgtggcagcctgtaatgattttggtatcaaagtaacactattccatgggcgtggagggagtattggtcgtggtggtggccccacatatcttgccattcaatcccaaccacctggttcagttatgggtactcttcggtcaactgagcaaggagaaatggtgcaggccaagtttgggctgccacatactgccatcagacaactagagatatacacaactgctgtgctgcttgcaacccttcgtcctccacatccacctcgagaagaacaatggcgcaatgtcatggaggagatttcaaaaatcagttgccagaattaccggagcacagtctatgaaaacccagaattcctcgcctacttccatgaggctactccccaggctgagcttggctttcttaacataggaagccgccccacaagaagaaagagctcaactggtattggacatcttcgtgccattccatgggtattcgcatggacccagaccagatttgttcttcctgcttggcttggagttggagcaggtttaaagggtgcttgtgagaagggatttactgaagacttgaaagcaatgtacaaagaatggcctttcttccaatctactattgatcttatagagatggtactagggaaggcagacattcctatagccaagcactatgatgaagttcttgtatctgagagcaggcgagagcttggagctgagcttaggagtgagctcttaacaacagaaaagtatgtgttggtggttagtgggcatgagaaactatctcagaacaaccgcagcctgcggaggctaatagagagcaggctgccttatctcaatcctatgaatatgttgcaggtggaggttctaaagaggttgaggcgggacgacgacaacaataagctcagagatgccctgcttattaccataaatgggattgctgctggaatgaggaacacaggctga

SEQ ID NO: 22 - protein, 1052 aa, Ricinus communis
MTDTTDDIAEEISFQSFDDDCKLLGNLLNDVLQREVGSKFMEKLERNRILAQSACNMRLAGIEDTAELLEKQLALEISRMTLEEALTLARAFSHYLNLMGIAETHHRVRKARSMTHLSKSCDDIFNQLLQSGISAEELYDTVCKQEVEIVLTAHPTQINRRTLQYKHIRIAHLLDYNDRPDLTHEDREMLIEDLVREITSIWQTDELRRHKPTPVDEARAGLNIVEQSLWKALPHYLRRVSTALKKHTGKPLPLTCTPIRFGSWMGGDRDGNPNVTAKVTRDVSLLSRWMAVDLYIREVDSLRFELSMVQCSDRLLKVANDILIEETSSEDHHESWNQPASRSQTKFPRKSLPTQLPPRADLPACTECNDGESQYPKLELPGTDYMPFNRQEALGSSYSESSSQDINHGLPKTTGNGSVANSSGSPRASFSSAQLVAQRKLFAESKIGRSSFQKLLEPSLPQRPGIAPYRIVLGNVKDKLMRTRRRLELLLEDLPCEYDQWDYYETTDQLLDPLLLCYESLQSCGAGVLADGRLADLIRRVATFGMVLMKLDLRQESGRHADTLDAITKYLEMGTYSEWDEEKKLEFLTRELKGKRPLVPPTIEVAPDVKEVLDAFRVAAELGSDSLGAYVISMASNASDVLAVELLQKDARLAVSGELGRPCPGGTLRVVPLFETVKDLRGAGSVIRKLLSIDWYREHIIKNHNGHQEVMVGYSDSGKDAGRFTAAWELYKAQEDVVAACNDFGIKVTLFHGRGGSIGRGGGPTYLAIQSQPPGSVMGTLRSTEQGEMVQAKFGLPHTAIRQLEIYTTAVLLATLRPPHPPREEQWRNVMEEISKISCQNYRSTVYENPEFLAYFHEATPQAELGFLNIGSRPTRRKSSTGIGHLRAIPWVFAWTQTRFVLPAWLGVGAGLKGACEKGFTEDLKAMYKEWPFFQSTIDLIEMVLGKADIPIAKHYDEVLVSESRRELGAELRSELLTTEKYVLVVSGHEKLSQNNRSLRRLIESRLPYLNPMNMLQVEVLKRLRRDDDNNKLRDALLITINGIAAGMRNTG

SEQ ID NO: 23 - DNA, 3350 bp, Arabidopsis thaliana
acacttgttagatttacttttcctccgcactatcagcagatttttctcatctgggtctgtttgtttctgttgactcaaagtttccgactttcttattttctgtctccgatttcatcgccgaaatctcagtcaattttgtctttagatctttaatttttggatccctttaattattttgtttggtcttacttcagagcgaagcaggtgaaaaaatggcgaatcggaagttagagaagatggcatcgattgatgttcatcttcgtcaactggttcctggcaaagttagtgaagacgacaagcttgttgagtatgatgctttgcttctagatcggtttctcgatatcctccaggatttgcacggtgaagatctccgtgaaactgttcaagagctttatgagcattctgcagaatacgaagggaagcatgaacctaagaagctagaggagctagggagtgtgctaacgagtttagatccaggagattccattgttatcgctaaagctttctctcatatgcttaacttagccaatttggctgaggaagtgcagattgcttatcgccgtaggatcaagaagctgaagaaaggtgattttgttgatgagagctctgctactactgaatctgatcttgaagaaactttcaagaagcttgttggagatctgaacaagtctcctgaagagatctttgatgctctcaagaatcagactgtggatttggttttgactgctcatcctactcagtctgtgagaagatcattgcttcagaaacatgggaggataagagactgtctggctcaactatatgctaaggatattactcctgatgacaagcaagagctcgatgaggctcttcagagagagattcaagctgcattccgaacagatgaaatcaaaagaacaccacctactcctcaagatgagatgagagcgggaatgagttatttccatgaaactatctggaaaggtgttcctaagtttctgcgccgtgttgacacggctttgaaaaacatagggatcgaagaacgtgttccatataatgctccattgattcagttctcttcttggatgggtggtgatcgtgacggtaacccaagggttacacctgaagtcaccagagatgtttgcttgttagctagaatgatggctgctactatgtactttaaccaaatcgaagatcttatgtttgagatgtctatgtggcgttgcaatgacgagctgcgtgcgcgagctgatgaagttcatgcaaattcgaggaaagatgctgcaaaacattacatagaattctggaagtcaattcctacaactgagccataccgtgtgattcttggcgatgtaagggacaagctttatcacacacgtgaacgcgctcatcaactgctcagcaatggacactctgatgtccctgtagaggctactttcattaacttggaacagttcttggaacctcttgagctctgttaccgatctctgtgttcatgtggtgatcgtccaatagcagatggaagccttcttgatttcttgaggcaagtctcaacctttgggctctctcttgtgagacttgacataaggcaagaatctgaccgccacactgatgtattggatgctatcaccacgcatttagatatcggatcctacagagagtggtctgaagaacgccgccaagaatggcttttatctgagctaagtggcaaacgtccgcttttcggttctgatcttcctaaaaccgaagaaatagctgatgttctggacacgtttcatgtcatagccgagctaccagcagatagctttggtgcttacattatctctatggcaactgcaccttctgatgtattagctgttgagcttttacagcgtgaatgccgagtgaaacagcctttgagagttgttccgctctttgagaagctagcagatctggaagcagctcctgctgcagttgctaggctcttttctgttgattggtacaaaaaccgaattaacggtaagcaagaggttatgattggttattcggattcaggaaaagatgctggacggttatctgctgcttggcagttatacaaagctcaagaagagcttgtgaaggttgctaaagagtacggtgtgaagctaacaatgtttcacggtcgtggtggcacggtcggaagaggaggtggaccaacccatcttgctatattgtctcagcctccggatactattaacggttccctccgtgtcacagttcaaggtgaagtcatcgagcaatcgtttggtgaagagcacttatgctttagaacacttcagcgtttcacagctgctacactcgagcacggtatgcgtcctccaatttcgcctaaaccagaatggcgcgctttgctggatgaaatggcggttgttgcaaccgaggagtatcgctcagttgtgttccaagaacctcggtttgtcgagtacttccgcctcgctacaccggaactggagtatggacgtatgaatatcggaagcagaccttcgaagcgtaaaccaagcggtggcattgaatctctccgtgcaattccatggatcttcgcttggactcaaacaagattccatcttcctgtatggcttggattcggatcagcaattagacatgtgatcgaaaaagacgtcaggaacctccatatgctccaagatatgtaccaacactggcctttctttagagtcaccattgatctaatcgaaatggtgttcgctaaaggagatcctggtattgctgctttgtacgataagcttcttgtttcagaggaactctggccttttggtgagaaactcagagctaacttcgaagaaaccaagaaactcatcctccagaccgctggacacaaagatcttcttgaaggtgatccttacttgaaacagagactgagacttcgtgattcttacattacaactctcaatgtctgtcaagcttacacattgaagagaatccgtgatccgagttaccatgtgactctgcgaccacacatttctaaggagatagcggaatcgagcaaaccagcaaaagaactcatcgagcttaacccgactagcgaatacgcgccaggacttgaagatacactcatcttgacgatgaagggtattgctgctggtctacaaaacaccggttaagctacaaagagatggttaaacaaactttgaatctctctttctctctcaagtctctcctttttttaactacagatttggaaaataaggttggattctggtttattttatgtatccaccgtcaaaatgttgattttcgtgtacgagtacttcgagatcattgaacacatgctctgtttttttctcaagtttaataaaacagaacaagagaatcttttcttgtttattttcttatct

SEQ ID NO: 24 - protein, 967 aa, Arabidopsis thaliana
MANRKLEKMASIDVHLRQLVPGKVSEDDKLVEYDALLLDRFLDILQDLHGEDLRETVQELYEHSAEYEGKHEPKKLEELGSVLTSLDPGDSIVIAKAFSHMLNLANLAEEVQIAYRRRIKKLKKGDFVDESSATTESDLEETFKKLVGDLNKSPEEIFDALKNQTVDLVLTAHPTQSVRRSLLQKHGRIRDCLAQLYAKDITPDDKQELDEALQREIQAAFRTDEIKRTPPTPQDEMRAGMSYFHETIWKGVPKFLRRVDTALKNIGIEERVPYNAPLIQFSSWMGGDRDGNPRVTPEVTRDVCLLARMMAATMYFNQIEDLMFEMSMWRCNDELRARADEVHANSRKDAAKHYIEFWKSIPTTEPYRVILGDVRDKLYHTRERAHQLLSNGHSDVPVEATFINLEQFLEPLELCYRSLCSCGDRPIADGSLLDFLRQVSTFGLSLVRLDIRQESDRHTDVLDAITTHLDIGSYREWSEERRQEWLLSELSGKRPLFGSDLPKTEEIADVLDTFHVIAELPADSFGAYIISMATAPSDVLAVELLQRECRVKQPLRVVPLFEKLADLEAAPAAVARLFSVDWYKNRINGKQEVMIGYSDSGKDAGRLSAAWQLYKAQEELVKVAKEYGVKLTMFHGRGGTVGRGGGPTHLAILSQPPDTINGSLRVTVQGEVIEQSFGEEHLCFRTLQRFTAATLEHGMRPPISPKPEWRALLDEMAVVATEEYRSVVFQEPRFVEYFRLATPELEYGRMNIGSRPSKRKPSGGIESLRAIPWIFAWTQTRFHLPVWLGFGSAIRHVIEKDVRNLHMLQDMYQHWPFFRVTIDLIEMVFAKGDPGIAALYDKLLVSEELWPFGEKLRANFEETKKLILQTAGHKDLLEGDPYLKQRLRLRDSYITTLNVCQAYTLKRIRDPSYHVTLRPHISKEIAESSKPAKELIELNPTSEYAPGLEDTLILTMKGIAAGLQNTG

SEQ ID NO: 25 - DNA, 3309 bp, Arabidopsis thaliana
gtctcgtttaaatttttataaactccataattttatcttaaagtgaatcttttttgttttttttgttccagctttatcggatatatttccttgattttctccgattgtggtcaatctggaaaattattgagaatctctccctcacttaaccaaaagcgtttttaatcagatagagagagaggaaaaagcatcaaccaaaccatggctgcgagaaatttggagaagatggcttctattgatgctcagctcaggcttcttgctcctggcaaggtttctgaagacgacaagcttatcgagtacgatgctctgttactggatcgatttctcgatattcttcaggatttgcatggcgaggatgtcagagaattcgttcaagaatgctacgaagttgcagctgattacgatggaaaccgcaacactgagaagcttgaggagcttggaaatatgctgacgagtttggatccaggggattcaattgttgtcactaaatcattctccaacatgcttagcttggctaatctggctgaggaagtccagattgcttaccggcgtaggattaagaaactcaagaaaggtgatttcgctgatgaggcctctgcaacaacggaatctgacattgaagagactctcaagaggcttttgcagcttaacaagactcctgaagaggtctttgatgctcttaagaatcagactgttgacttggttttaactgctcatcccactcaatctgttcgtcggtctttgctccaaaagtttggaaggattcgtgattgtttgacgcagttatatgcaaaggacattactcctgatgacaaacaagaactcgatgaagctctgcaacgagagattcaagctgcttttcgcacagatgaaatccgaagaactcctcctacaccgcaagatgaaatgagagcagggatgagctacttccatgagacaatctggaaaggagttccaaagttcttaagacgtgttgacacagctttaaagaacattggaatcaacgagcgtgttccttacaatgcgcctctcattcagttctcttcttggatgggcggagaccgtgatggaaacccgcgagtaactcctgaagttacaagagatgtatgcttattagctagaatgatggctgctaatctctacttctcccagatagaagatcttatgtttgagatgtctatgtggcgttgcaatgaggaacttcgggttcgtgcagaacgtcaaagatgtgcgaagagggatgcaaaacactatatagaattctggaaacaaatccctgcgaatgagccataccgagctattcttggagatgtgagggacaagctgtacaacacacgtgagcgtgcacgtcagttattgtcaagcggagtttcggacgttcccgaagacgcggttttcacaagtgtggatcagtttttggagccacttgagctttgttacaggtcgctctgtgattgcggtgacagacctattgctgatggaagcctgcttgatttcttacgccaagtgtcaacatttggccttgctcttgtgaaacttgatatccgtcaagaatctgaaagacactctgatgtcttggatgccatcacgacgcacttaggtattggttcttacaaagaatggtcggaggataaaagacaggaatggctgttatctgagctaagcgggaaacgccctctctttggaccggatcttcccaaaaccgaagaggttgcagatgtgttggacactttcaaagtcatttctgagcttccttcggatagttttggtgcttatattatctcaatggccactgctccatcagacgtgctcgctgttgagcttttgcaacgcgaatgcgggatcactgatcctctgagagttgtcccgttgttcgagaagctagcggatttagaatccgcacctgctgcagttgcccgtctcttctccatagaatggtacagaaacaggatcaatggaaagcaagaagtcatgatcgggtactctgactcgggcaaagatgctggtcgtttatcagcggcttggcagttatacaagactcaagaagagctcgtgaaggtggcaaaagaatacggagtcaagctgacaatgttccacggaagaggtgggaccgttggacgaggaggtggacctacccatcttgctattttgtctcagcctccggataccattcatgggcaattgagggtaacggttcaaggtgaagttattgaacagtctttcggagaagagcacttatgctttaggactcttcagcgtttcacagctgcaacacttgagcatggaatgcatccaccggtttcccctaagcctgagtggcgtgtcctcatggatgaaatggctataattgccactgaagaataccgttctgttgtcttcaaggagccccgttttgttgagtacttccgtctggcaacaccagagctcgagtatggaaggatgaacataggaagccgaccatcaaaacgtaaaccaagcggaggaatcgagtcgctgcgtgcaatcccgtggatctttgcgtggactcagacgaggttcacttacccgtgtggcttggctttggaggagcattcaaacgcgtgatacagaaggacagtaagaatctcaacatgctcaaagagatgtacaaccaatggccattcttccgtgtcacaattgatctagtcgaaatggttttcgccaaaggagatcccggaattgcggctctgtatgaccgcctcctcgtctctgaagaacttcaaccattcggtgaacaacttcgagttaactaccaagagaccagacgcctcctcctccaggttgcaggtcacaaagacattttagaaggtgacccttacttgaggcaaaggctgcagcttcgtgacccatacatcacgacattgaacgtgtgtcaagcctatacactcaagcagatccgtgacccaagcttccacgtcaaagtccggccacatctctctaaggactacatggagtctagtccagcggctgagctcgtgaaactgaatccaaagagtgaatacgcaccgggacttgaagatacggttatcctcaccatgaagggtatcgctgctggtatgcaaaacaccggttaaggcagtttaaaacgttcttgtaccattccctaaatctacgctatgtaatgtattatgttctatgatgtgatgaaatctctccaactcctatcccgtacgctttttaatgagtatgataatttcttgtgttattctattgttgttatgttaccatatctaggaaatatatttctgaaagaaacaagaaaagaaatctttcttttcgttctaagatgtt

SEQ ID NO: 26 - protein, 793 aa, Arabidopsis thaliana
MAARNLEKMASIDAQLRLLAPGKVSEDDKLIEYDALLLDRFLDILQDLHGEDVREFVQECYEVAADYDGNRNTEKLEELGNMLTSLDPGDSIVVTKSFSNMLSLANLAEEVQIAYRRRIKKLKKGDFADEASATTESDIEETLKRLLQLNKTPEEVFDALKNQTVDLVLTAHPTQSVRRSLLQKFGRIRDCLTQLYAKDITPDDKQELDEALQREIQAAFRTDEIRRTPPTPQDEMRAGMSYFHETIWKGVPKFLRRVDTALKNIGINERVPYNAPLIQFSSWMGGDRDGNPRVTPEVTRDVCLLARMMAANLYFSQIEDLMFEMSMWRCNEELRVRAERQRCAKRDAKHYIEFWKQIPANEPYRAILGDVRDKLYNTRERARQLLSSGVSDVPEDAVFTSVDQFLEPLELCYRSLCDCGDRPIADGSLLDFLRQVSTFGLALVKLDIRQESERHSDVLDAITTHLGIGSYKEWSEDKRQEWLLSELSGKRPLFGPDLPKTEEVADVLDTFKVISELPSDSFGAYIISMATAPSDVLAVELLQRECGITDPLRVVPLFEKLADLESAPAAVARLFSIEWYRNRINGKQEVMIGYSDSGKDAGRLSAAWQLYKTQEELVKVAKEYGVKLTMFHGRGGTVGRGGGPTHLAILSQPPDTIHGQLRVTVQGEVIEQSFGEEHLCFRTLQRFTAATLEHGMHPPVSPKPEWRVLMDEMAIIATEEYRSVVFKEPRFVEYFRLATPELEYGRMNIGSRPSKRKPSGGIESLRAIPWIFAWTQTRFTYPCGLALEEHSNA

SEQ ID NO: 27 - DNA, 3231 bp, Arabidopsis thaliana
ccacgcgtccgaatccgcagagatttcttcttttcagaagaagtaagagggtggcgaagaagatttgattgatcggcgataatggcgggtcggaacatagagaagatggcatctattgatgctcagcttcggcaactcgttcctgctaaagtcagtgaagacgataagcttgttgagtacgatgctcttctccttgatcgctttctcgacattctccaggatttacacggcgaggatctccgtgaaacggttcaagagttatacgagctttctgctgagtatgaagggaagcgtgagcctagcaagcttgaggagctagggagtgtcctaacgagtttggatcctggtgactcaattgttatctccaaggctttctctcacatgcttaacttagccaatttggctgaggaggtgcagattgctcaccgtcgcaggatcaagaagctgaagaaaggtgatttcgttgatgagagttctgcaactactgaatccgatattgaagagacttttaagaggctcgtttcggatcttggtaagtctcctgaagagatctttgatgccttgaagaatcagactgtggatctggttttgactgctcatcctactcagtctgtgcgtagatcattgcttcagaagcatgggaggataagggactgtcttgctcaactctatgcaaaggacattactcctgatgacaagcaggagctagatgagtctctgcaaagagagattcaagctgcattccgaacagatgagattagaagaacacctccaaccccacaagatgaaatgagagctggaatgagttatttccacgagacaatctggaaaggtgtccccaagttcttgcgccgtgtggacacagctctgaaaaacattgggattgatgaacgtgttccttacaatgccccattgattcaattctcttcgtggatgggcggtgatcgtgatggtaatccgagggtcacacctgaggtcactagagatgtgtgcttgttggctagaatgatggctgccaatctctactataaccaaatcgagaatctgatgtttgagttatctatgtggcgttgcactgatgaattccgtgtgcgggcggatgaactgcacaggaactcaaggaaagatgctgcaaaacattacatagaattctggaagacaattcctccaactgagccataccgtgtgattcttggtgatgtgagggataagctgtatcacacacgtgagcgttcccgccaattgctgagtaatggaatctcggatattcctgaagaagctaccttcactaatgtggaacagttcttggagcctcttgagctctgttaccgatcactatgttcatgtggtgacagcccgatagctgatggaagccttcttgatttcttgaggcaagtctctacctttggactctcccttgtgagacttgacatcaggcaagagtctgaacgccacacagatgtcttggatgctatcaccaagcacttggacatcggttcctcctatagagactggtctgaagaaggccgacaggaatggcttcttgctgaactaagcggcaaacgtccacttttcggacctgatcttcccaaaaccgaagaaatttctgatgtcctggacacattcaaagtcatatctgagctgccttcagattgttttggagcttatattatctctatggcaacttcacctagtgatgtgcttgcggttgagcttttacagcgcgaatgccatgtgaaaaatccacttagagttgttccactctttgagaagctagctgatcttgaagcagctcctgccgctgttgcaagactcttttctatagactggtacaaaaaccgtattaacggtaaacaagaggttatgattggttactcagattcagggaaagatgcagggcgtctctcagctgcttgggagctatacaaagctcaagaagagcttgtgaaggttgctaagaaatatggagtgaagctaactatgttccatggccgtggtggcacagtcggaagaggaggtggtcctactcatcttgctatattgtctcagccaccagatacagttaatggctctcttcgagtcacggttcagggtgaagtcattgagcaatcatttggggaggcacacttatgctttagaacacttcaacgtttcacagcagctactctagagcacggaatgaaccctccgatttcaccaaaacccgagtggcgtgctttgcttgatgaaatggcggttgttgcaactgaggaataccgatctgtcgttttccaagaacctcgattcgtcgagtatttccgcctcgctactccggagctggagtatggacgtatgaatattggaagtagaccttcaaagcgaaaaccaagcggtgggatcgaatctctccgtgcaatcccatggatctttgcttggacgcaaacaagattccatcttcctgtatggttaggtttcggagcagcatttaggtatgcgatcaagaaggatgtgagaaaccttcacatgctgcaagatatgtataaacaatggccctttttccgagtcaccatcgatctaattgaaatggtgttcgccaagggagaccccgggatcgctgctttgtacgacaaacttcttgtctcagaagatttatgggcttttggagagaaactcagagccaactttgatgaaaccaagaacctcgtcctccagactgctggacataaagaccttcttgaaggagatccttacttgaaacagagactaaggctacgtgactcttacattacgaccctcaacgtttgccaagcctacacattgaagaggatccgtgatgcaaactacaatgtgactctgcgaccacacatttctaaagagatcatgcaatcaagcaaatcagcacaagagctcgtcaagcttaaccccacgagtgaatacgcgcctggacttgaggacacacttatcttaaccatgaagggtattgctgcaggattgcaaaacaccggttaagtgagtcagtgaaagaaaacaaaacttcgaatctctcttttttatctaccctttttaataatctctttttttctagaatccaaaataattacggttggattacagtttactttatgtatccaccgttgaaatcttaatcttccattgtatcaaacgtcactgactctgtttctggaagtgtaaacaagaacagagacagtgaatcttaatgttatcttctttgtctaaaaaaaaaaaaaaaaa

SEQ ID NO: 28 - protein, 968 aa, Arabidopsis thaliana
MAGRNIEKMASIDAQLRQLVPAKVSEDDKLVEYDALLLDRFLDILQDLHGEDLRETVQELYELSAEYEGKREPSKLEELGSVLTSLDPGDSIVISKAFSHMLNLANLAEEVQIAHRRRIKKLKKGDFVDESSATTESDIEETFKRLVSDLGKSPEEIFDALKNQTVDLVLTAHPTQSVRRSLLQKHGRIRDCLAQLYAKDITPDDKQELDESLQREIQAAFRTDEIRRTPPTPQDEMRAGMSYFHETIWKGVPKFLRRVDTALKNIGIDERVPYNAPLIQFSSWMGGDRDGNPRVTPEVTRDVCLLARMMAANLYYNQIENLMFELSMWRCTDEFRVRADELHRNSRKDAAKHYIEFWKTIPPTEPYRVILGDVRDKLYHTRERSRQLLSNGISDIPEEATFTNVEQFLEPLELCYRSLCSCGDSPIADGSLLDFLRQVSTFGLSLVRLDIRQESERHTDVLDAITKHLDIGSSYRDWSEEGRQEWLLAELSGKRPLFGPDLPKTEEISDVLDTFKVISELPSDCFGAYIISMATSPSDVLAVELLQRECHVKNPLRVVPLFEKLADLEAAPAAVARLFSIDWYKNRINGKQEVMIGYSDSGKDAGRLSAAWELYKAQEELVKVAKKYGVKLTMFHGRGGTVGRGGGPTHLAILSQPPDTVNGSLRVTVQGEVIEQSFGEAHLCFRTLQRFTAATLEHGMNPPISPKPEWRALLDEMAVVATEEYRSVVFQEPRFVEYFRLATPELEYGRMNIGSRPSKRKPSGGIESLRAIPWIFAWTQTRFHLPVWLGFGAAFRYAIKKDVRNLHMLQDMYKQWPFFRVTIDLIEMVFAKGDPGIAALYDKLLVSEDLWAFGEKLRANFDETKNLVLQTAGHKDLLEGDPYLKQRLRLRDSYITTLNVCQAYTLKRIRDANYNVTLRPHISKEIMQSSKSAQELVKLNPTSEYAPGLEDTLILTMKGIAAGLQNTG

SEQ ID NO: 29 - DNA, 3102 bp, Arabidopsis thaliana
acaatgacggacacaacagacgatatcgcagaggaaatctcattccaaagcttcgaagatgactgcaaattgctcggtagtctcttccatgatgtgttacaaagggaagttggcaacccattcatggaaaaagtcgaacgcattcggattcttgctcagagtgcgttaaatttgcgtatggctggtattgaggataccgcaaaccttttggagaagcaattgactagtgaaatatccaaaatgccactagaagaagccttaacgttggctcgtacattcactcattctcttaacttaatgggcattgcagacactcatcacagaatgcacaaagtccataacgttacacaacttgcaagatcttgtgatgatatattcagccagctattgcaaagtggaatctctccagacgaactttataaaactgtttgcaaacaggaggtcgaaattgttcttactgctcatcctacccaaataaatcgaagaaccttgcagtacaagcatattagaattgctcatcttctagaatataacactagatcagatctaagcgttgaagatcgcgaaacgctcattgaagatttggttagagagattacttcactgtggcaaactgatgagcttagacgtcagaaacctactccagttgatgaagctagagctggtctaaacatagtggagcaatccctttggaaagcagtaccacaatacctgcgtcgtgtcagcaattccttgaagaagtttacagggaagccacttccactaacatgcactcctatgaaatttggttcttggatgggaggtgatagagatggaaatccaaatgtcacggcaaaggtcacgaaagaagtatctctcttgtctagatggatggctattgatttgtacataagagaggttgatagcttaagatttgaattatctacggatcgatgcagtgataggttttcaagattagctgataaaattcttgaaaaggattatgatagaggaaaatcaaatttccaaaagcaacaaagttcatcatgcttgccaacacaacttccagctagagctcaccttcctgcttgcattgactttggtgaatcacgacataccaaatttgaaattgcgacgacagattatatgccacccaatctccagaagcagaatgaacaagacttttcggaaagcgactgggagaaaattgacaatggttcgcggtccggtcttacttctcgaggttctttctcatctacttctcaacttcttctccagagaaaactatttgaggaatctcaggttgggaagactagtttccaaaagctactagaaccacctccacttaaacgagctggaagtgctccttatcgtattgttcttggagaagtaaaagaaaagcttgtgaagacaagaagacttcttgaacttcttattgagggtcttccttgtgagtatgaccctaaaaactcctatgaaacatcagatcagcttcttgaaccattgctcctctgttacgaatctctgcaatcatcgggtgctagggtactagctgatggacgacttgctgatctgattcgtagagtttctacctttggaatggttttggtgaaactcgacttacgccaggaagctgcaagacattctgaagctttggatgcaattacaacatacttggatatgggtacttatagtgaatgggatgaagagaagaaattagaatttttgacaagagaactaaaagggaaacgacctcttgttcctcaatgtattaaggttggtcctgacgtcaaagaagtattggacacattccgagtcgctgctgaacttggaagtgaatcacttggcgcttacgttatttctatggcttcaaatgcaagtgatgtcctcgctgtggaacttcttcaaaaagatgctcgacttgctttaactagcgaacatggaaaaccatgtcctggtggaacgctacgagtggtacctctttttgaaacggtgaatgatttaagagccgctggtccttcgataaggaaattgctctcaatcgattggtatagggaacacatccaaaagaaccacaacggtcaccaagaggtgatggttggatactctgattctggaaaagatgctggacgttttactgcagcatgggaactctacaaagctcaagaaaatgttgttgctgcttgtaatgaatttggaatcaaaataacattatttcatggacgaggaggaagcattggtcgtggtggtggtccaacctatctcgctattcagtcccaaccaccaggctctgtaatgggctctttgcgttcaactgagcaaggtgagatggttcaagctaagtttgggataccacaaacggctgttaggcaactagaggtatacacaaccgcggttctactcgctaccttaaagcctcctcagccacctcgagaggaaaaatggcgaaacctaatggaagaaatctctggaatcagttgccaacactatagaagcacagtgtatgaaaacccagagtttctatcttattttcatgaggcaacaccgcaagcagaacttggtttcctcaatataggaagccgaccaacacgaagaaagagctctagtggaataggacatctccgagctatcccttgggtctttgcttggactcaaacaaggtttgttcttccagcttggcttggtgtaggggctggtttaaagggagtttctgagaagggtcatgcggatgatcttaaagagatgtacaaagaatggccattttttcagtccacccttgaacttatagagatggtgttagctaaagcagacattccaatgaccaaacactacgacgaacaacttgtgtctgagaaaagaagaggacttggcactgagctaagaaaagaactaatgactactgagaagtacgttcttgtgataagtggtcacgagaaactcttgcaggacaataagagcttgaagaaactcattgatagtagacttccgtatctcaacgcaatgaacatgttacaagttgaaattcttaagaggctaagacgtgatgaagataacaataagctaagagatgctttgcttatcacaatcaatggtattgctgcaggaatgagaaataccggttaa

SEQ ID NO: 30 - protein, 1032 aa, Arabidopsis thaliana
MTDTTDDIAEEISFQSFEDDCKLLGSLFHDVLQREVGNPFMEKVERIRILAQSALNLRMAGIEDTANLLEKQLTSEISKMPLEEALTLARTFTHSLNLMGIADTHHRMHKVHNVTQLARSCDDIFSQLLQSGISPDELYKTVCKQEVEIVLTAHPTQINRRTLQYKHIRIAHLLEYNTRSDLSVEDRETLIEDLVREITSLWQTDELRRQKPTPVDEARAGLNIVEQSLWKAVPQYLRRVSNSLKKFTGKPLPLTCTPMKFGSWMGGDRDGNPNVTAKVTKEVSLLSRWMAIDLYIREVDSLRFELSTDRCSDRFSRLADKILEKDYDRGKSNFQKQQSSSCLPTQLPARAHLPACIDFGESRHTKFEIATTDYMPPNLQKQNEQDFSESDWEKIDNGSRSGLTSRGSFSSTSQLLLQRKLFEESQVGKTSFQKLLEPPPLKRAGSAPYRIVLGEVKEKLVKTRRLLELLIEGLPCEYDPKNSYETSDQLLEPLLLCYESLQSSGARVLADGRLADLIRRVSTFGMVLVKLDLRQEAARHSEALDAITTYLDMGTYSEWDEEKKLEFLTRELKGKRPLVPQCIKVGPDVKEVLDTFRVAAELGSESLGAYVISMASNASDVLAVELLQKDARLALTSEHGKPCPGGTLRVVPLFETVNDLRAAGPSIRKLLSIDWYREHIQKNHNGHQEVMVGYSDSGKDAGRFTAAWELYKAQENVVAACNEFGIKITLFHGRGGSIGRGGGPTYLAIQSQPPGSVMGSLRSTEQGEMVQAKFGIPQTAVRQLEVYTTAVLLATLKPPQPPREEKWRNLMEEISGISCQHYRSTVYENPEFLSYFHEATPQAELGFLNIGSRPTRRKSSSGIGHLRAIPWVFAWTQTRFVLPAWLGVGAGLKGVSEKGHADDLKEMYKEWPFFQSTLELIEMVLAKADIPMTKHYDEQLVSEKRRGLGTELRKELMTTEKYVLVISGHEKLLQDNKSLKKLIDSRLPYLNAMNMLQVEILKRLRRDEDNNKLRDALLITINGIAAGMRNTG

SEQ ID NO: 31 - DNA, 6018 bp, Sorghum bicolor
aggcctagtattgcttcaaattctgcggcaattcaactcaacaaatgcttatcctgagtttgtttatatgtactccattagttttattaaagataagttctcttgattattctacgtagatagctttgttgtacactcattatattattttatatatacataatacaaaataatatttatctaaaaaaatcagaacaatgtgcacatactaataaattcccatttcaatgttggaccatgagcagatctgacggtacacatgttcaagtgtctccgttctcctgtggaaataataaatcgcagccgtccacgtgacacacaacacagatgtctctcgatcagtataggctgttcctgttcttcgctttggtaacaaatcccctgcaaattgatcgataatataagaataaaataacgtgcatctcgtacattcgcttggacctgcctgctaaatgctaatgctaatgctaccatcttcctcctccgtctataaagtggccgccagaatccgctcctcctacaattgcagcagcctcctctcctctcctccctgcctggttcttgcttgcagttcttgaaccaaatccacaccgccggcgcgcttagcattggggctagctagggggccgatcgatatggcggccttaggggcgaagatggagcggctgtcgtcgatcgacgcgcagctgcggatgctggtgccggggaaggtctcggaggacgacaagctcatcgagtacgacgcgctcctcctcgaccgcttcctcgacatcctccaggacctccacggcgacgacctcaaggagatggtaactctcctccgactggttcttagactcttgttgttcttttgttttactggttcgggcttgcgatgcagctttaatcttgggttggatccaagtaatctagttcagtcctgtggtctttacctgttatttttacctttatttaatcttccatgttttttttacttatttgtcttctttttcctgagaaaaaagtatcaatgtttagtaaaaaaaaaggcatgaaattattgccttctttgttctttgttttcttttcgtgcgattcctttttagagtgccagcttgagtagtattgaagagtgtgtggttgacttcagagtccactcttcagattaagtgattaacacttcaggtttaagtgtaactacaaggtggttgatttgctgcttaatttggcgttgtcaagtatagtaattatactaaaatataaattatagtggatggccaggtgctggattaacgttcctagtgttcaatttcttcttcttcttcttctttttgttttgttattgctcaaagattggtttttcagtggcaaagcgatcatctcgatttttgattgattgggtcggatatggttcgaatttgatctcaatcattcggtagaacacttcctatgtggaaatccatctgtaacaagtgtggatcttagttgtatatatgttcctggtccattaactgactttggaccgattgattgactgaaacaacgaaacgctgcagattccacgtcatcttttgagttcttgacttttcgtttggatggcaacatatagttgacaaaacaaactttatctccagcaacgcaactttacacctgattgcagttcatagcacgtgaacccctgtcatctttctagcaccttccctgacagaacatggacacccagaacatgtgacaactaatagacaaactatgaaaatttttggatcaaaataaagcccccgttgaagtgggtatgtttgtattgctcagaaagtgtgacttaccatattaaatttatttgacatggccagctggcagcaatactacatatgtaaatttatttggaactgatatagtgatatgtggattgagtatggtagtaacaaaatccagaaaccgacatatctttctctcttttttttaatcatgtatggtcattaattgagttctcttgctgattaggttcaagaatgctatgaggtagctgctgagtatgaaacaaaacatgacttgcaaaagcttgatgaactcgggaagatgataacaagcttggatcctggggactctattgtgatcgccaagtctttctcgcacatgcttaacttggccaacttggctgaggaagtccagatagcatacaggaggagaatcaagctcaagaagggagactttgctgatgagaactcggcaatcacagaatctgacattgaggaaacacttaagaggcttgttgttgacctgaagaagtcacctgctgaggtatttgatgccctcaagagccagactgttgatctggttttgactgcacatccaacacagtctgtgaggaggtcactgctccagaaacactcgaggttggtttgccaaacgttgcattgtagttgacatgcacaactccgttttagcctttaatcttgatcccaacattcttaccaggatacgaaactgtttggttcaactctactcaaaagatatcactccagatgataagcaggaacttgatgaggctctgcagagagaggtatttatttcaatctaatgtttattacctggaattctttgaagcttgagaccaaagatatcaattcttaattccttacatggactcctctctcctttttcaagatccaagctgcctttagaactgatgagatccgaagaacgcagcccactccccaagatgaaatgcgtgctggtatgagctacttccatgaaacaatttggaagggtgttccaaagttcttgcgccgagttgatactgcattgaagaacattgggattaacgagcgtgttccttacaatgcacctcttattcagttctcttcttggatgggaggagatcgtgatggtgcacgtgacatctctacatatttgtcttttcttctcatggcattataaatatgagtatttgcagcacctgttattatctttgttgctagtggttgggaagatgactattcattgtccatgtgtctgcagtctgcacctctgtcctttgtattctaaagcaatgtttctacaaatgcaggaaatccaagagtgacaccagaggttaccagggatgtctgcttgcttgccaggatgatggcatcgaacttgtactgctctcagattgaggatctcatgtttgaggttgctattactttcagaatcagagtatagttcataacatcatttctatcagatgattgaacttgataacttgaaatgcttgcagttgtctatgtggcgatgcagtgatgagctgcgcatgcgagctgatgagctgcatcgctccactaagaaggatgccaagcattacataggtagttaccagtgacatcattgggtcttcttaacaatggcctgttgttattaggccatatttttggcattttaataatttttccttcttcatttctgctgtagagttttggaagaaggttcctccaaatgagccatatcgggtgatactgagtgatgtcagggataaactctacaacactcgtgagcggtcacgagagcttttatccagtggacattctgatattcctgaggaagctacattgacaactgttgagcaggttgagaattaatcagtaatcttcagaaaataatattgatttcttggttttccctcagtgggttctgatatgtagatgccaacttttgcagctgttggagcccttggaactatgttacagatcactctgtgcttgtggtgaccgtgtaattgctgatggaagtcttctggatttcttgcgtcaagtctccacctttggactctcccttgtgaggcttgacattaggcaagaatcagatcggcatactgatgtccttgatgccatcactacgtacctggggataggatcttaccgcgagtggcctgaagaacgccgccaagaatggctactgtctgaacttaatggcaagcgccctctgtttggcccggaccttcccaagactgaggagattgctgatgttctagacacattccacgttatcgctgagcttcctgctgacaattttggtgcttatatcatttccatggcaacagctccttcggatgtacttgctgttgagctcctccaacgtgagtgtcatgtaaagacaccacttagagtagtcccactgtttgagaagttggctgatcttgaggctgccccagctgcattggccagactgttctcaatcgattggtatagacagaggatcaatggcaagcaggaggtcatgattgggtattcagattcaggcaaagatgcaggtcgactctcagcagcttggcagctatacaaagctcaggaggagctcatcaaggttgctaaggacttcggtgtgaagttgacgatgttccatggacgtggtgggactgttggaaggggtggtggtcccactcaccttgccatcttgtcccagccaccagacacgatccatggatcactccgggtcactgttcaaggtgaagtcattgagcagtcttttggtgaggagcacttgtcgtttaggacactgcaacgtttcacggctgctaccctggagcatggaatgcacccaccaaatgcaccaaagccagaatggcgaacccttcttgatgagatggcagttgtggcaactgaggaatatcggtccattgtctttcaagagccacgcttcgttgagtattttcgcctcgtgcagcatcgttgagtatttccgcctcgtagtccttgttgtccattgtcatactacagtaacataagcctgcaaaacgtaacttttgaaataggtcgcctgacttgagacttaatatgaatgtagcacaatgatttactgcactatatctttttgcaaacctaactaaaatggttaatgaaatatttgatttgaccctacatttagcgaatatttactttgtgatatttgtgttgacaggcaacacctgaaacagagtatggtaggatgaacataggaagcaggccatccaagagaaagccgagcggaggtatcgagtcactccgagcaatcccatggatctttgcttggacacaaacacggttccacctcccggtatggctaggatttggaggcgcattcaagcatgtcctccagaaggacatcaggaacctccacatgctccaggaaatgtacaatgagtggccatttttcagggtcactattgatctggtggagatggtgttcgccaagggtaaccctggcattgctgcactttatgacaaactcctagtttcagaggaactgcgtccattgggtgagaagctgagggccaactatgaagaaacccaaaagcttctacttcaggtcgctgtcctgtccaaaagacacatcgatacattcttgcactttgttgagctaccattctagtagcgttttatcattgaactctgttttggacttctatcaggttgccgggcacagggatctcctggaaggtgacccttacctgaagcagcggctccgcctccgtgacgcgtacatcaccaccctgaacgtctgccaggcctacaccctgaagcggatccgtgacccggactaccatgtcgcgctgcgcccccacctctccaaggagatcatggaccccaccaaggcggcttcagagctggtgaagctgaaccctggcagcgagtatgcaccggggctggaggacaccctcattctgaccatgaagggcatagcagccggtctccagaacaccggttaaaacacaaagaggggatctttttttttaatcctgatcattgtctctaggtcctttgtatttacgcagattttagctgcatcttcggccgtctctctacaccgtgaggaaataatgcgattttgccaaagtggcggtaaataaaagggagatgaggatcatacatgtttttcttattagtagaccgttgtgttgcaactttactatgcgataatggaacatgctgtagcctaattgaagtgccgtatctcaagcatttttgcaggcaggctctgaattgttggaattgttccaatgttccctttgcaatctgttgcctgcag

SEQ ID NO: 32 - protein, 960 aa, Sorghum bicolor
MERLSSIDAQLRMLVPGKVSEDDKLIEYDALLLDRFLDILQDLHGDDLKEMVQECYEVAAEYETKHDLQKLDELGKMITSLDPGDSIVIAKSFSHMLNLANLAEEVQIAYRRRIKLKKGDFADENSAITESDIEETLKRLVVDLKKSPAEVFDALKSQTVDLVLTAHPTQSVRRSLLQKHSRIRNCLVQLYSKDITPDDKQELDEALQREIQAAFRTDEIRRTQPTPQDEMRAGMSYFHETIWKGVPKFLRRVDTALKNIGINERVPYNAPLIQFSSWMGGDRDGNPRVTPEVTRDVCLLARMMASNLYCSQIEDLMFELSMWRCSDELRMRADELHRSTKKDAKHYIEFWKKVPPNEPYRVILSDVRDKLYNTRERSRELLSSGHSDIPEEATLTTVEQLLEPLELCYRSLCACGDRVIADGSLLDFLRQVSTFGLSLVRLDIRQESDRHTDVLDAITTYLGIGSYREWPEERRQEWLLSELNGKRPLFGPDLPKTEEIADVLDTFHVIAELPADNFGAYIISMATAPSDVLAVELLQRECHVKTPLRVVPLFEKLADLEAAPAALARLFSIDWYRQRINGKQEVMIGYSDSGKDAGRLSAAWQLYKAQEELIKVAKDFGVKLTMFHGRGGTVGRGGGPTHLAILSQPPDTIHGSLRVTVQGEVIEQSFGEEHLSFRTLQRFTAATLEHGMHPPNAPKPEWRTLLDEMAVVATEEYRSIVFQEPRFVEYFRLATPETEYGRMNIGSRPSKRKPSGGIESLRAIPWIFAWTQTRFHLPVWLGFGGAFKHVLQKDIRNLHMLQEMYNEWPFFRVTIDLVEMVFAKGNPGIAALYDKLLVSEELRPLGEKLRANYEETQKLLLQVAGHRDLLEGDPYLKQRLRLRDAYITTLNVCQAYTLKRIRDPDYHVALRPHLSKEIMDPTKAASELVKLNPGSEYAPGLEDTLILTMKGIAAGLQNTG

SEQ ID NO: 33 - DNA, 2901 bp, Glycine max
atggctgctcggaacatcgagaagatggcctcaattgatgctcaactgaggttgctggcgccacgcaaggtgtctgatgatgacaaactcgttgagtatgatgccttgttgttggatcgtttccttgacattcttcaggatttgcatggtgaagatatcagacaaacggtccaagattgttacgagctgtcagctgagtacgaaggagagcataagcctgaaaagttggaggaacttgggaatatgctgacgggtcttgatgctggggattcaattgttattgccaagtcattttctcacatgctcaatttggccaacttggcagaagaagttcaaattgcgtatcgaagaaggatcaagttactgaagaagggtgattttgctgatgagaactctgccattactgagtcagacattgaagagaccttcaagaagcttgtggctcaactgaagaagacaccccaggaaatctttgatgctttgaagaaccaaactgtggatttggttctaactgctcatcctactcagtctgttcgcagatctttgctgcaaaagcatggaaggataaggaattgtttgacacaattatatgctaaggacataacaccagatgataagcaggaacttgatgaggctttacaaagagagattcaagctgcatttcgcacagatgaaattcgaaggactcctcctaccccacaagatgagatgagggcaggaatgagctactttcatgagacaatttggaaaggtgtaccacagtttctgcgtcgggtagatacagctctgaagaacattggaattaatgaacgtgtcccatataatgctcctgttattcagttctcttcttggatgggaggagaccgtgatggtaatcctagagtaacccctgaagttacaagggatgtgtgtttgctggctagaatgatggctgctaatatgtacttctctcagatagaggatctcatgtttgagttgtctatgtggcgttgcactgacgagctacgtgttcgtgctcatgaactccataggtcctcaaagagagatgcaaaacattatattgagttttggaaacagattcctccaaatgagccatatcgtgttattcttggtgatgtcagagacaaactatataacattcgggaacgtgctcgccatttattagccaatgggacatctgatatccctgaggagacaaccttcactaacgttgagcagtttctggagccccttgaactatgctacaggtcactctgtgcatgtggtgacagaccaatagcagatggaagcctccttgatttcctgcggcaagtttccacatttggactctcactagtgagacttgacatccgtcaagagtcagataggcacactgatgttatggatgcaatcacaaaacacttagacattggatcataccgagagtggcccgaggaaaagaggcaggagtggctcttgtctgaactcagtggaaagcgccctctctttggccatgaccttcccaaaacagaagaaatcaccgatgttttggaaacattccgtgtcatttcagagcttccctcagacaacttcggtgcctacatcatatcaatggcaacatccccatctgatgtgcttgctgttgagcttttacaacgtgaatgccatgtgaagcagccactaagggtggtgccactgtttgaaaagcttgctgatcttgaggccgctccggctgcggtggcacgtcttttctctatagattggtacagaaaccgcattgatgggaagcaagaagttatgatagggtactcagactcaggaaaagatgcaggccgtctttctgcggcttgggcgctttacaaggctcaagaagaacttgtgaaggttgctaaggagtatggtgttaaacttacaatgtttcatgggagaggagggactgttggaagaggaggaggtccaactcatcttgctatattgtctcagccaccagacaccattcatggctcacttcgggtaacggttcagggtgaagtcattgagcagtcttttggagaggaacacttgtgctttagaacacttcagcgcttcactgcagctacacttgagcatggcatgcatcctcctgtgtcaccgaaacccgaatggcgtgccctcatggatgaaatggctgtcattgcaacaaaggagtatcgctctgttgttttcaaagaacctcgttttgttgaatatttcagatgtgcaactcctgagttggagtatggaagaatgaacattggcagtcgtccatcaaagcgaaagccaagtggaggaattgaatcactacgtgctattccttggatttttgcatggacacaaacgaggtttcatttgccagtgtggcttggttttgggtcagcatttaagcatgtagttgagaaagatccgaagaatctccaaatgcttcaggacatgtacaatcaatggcctttcttcagggtcaccctggacttggttgagatggtgtttgctaagggagacccggggattgcagccctatttgacaaactcctagtatcagaagagctgcgtccatttggagaaaatttaagagctaaatacgaagaaaccaagagctttctcctccaggttgctgggcacaaggatattcttgaaggagacccctacttgaagcaaagacttcgtcttcgtgactcatacatcacaaccctcaatgtgttgcaagcttacacattgaagcgaattcgtgatcctgactaccatgtgaagttgaggccacacttgtcaaaggactacatggaatcaagcaagccagcagcagagcttgttaaacttaaccccaaaagcgagtatgctcctggtcttgaggacacccttattttgacaatgaagggtattgctgctggaatgcaaaataccggttaa

SEQ ID NO: 34 - protein, 966 aa, Glycine max
MAARNIEKMASIDAQLRLLAPRKVSDDDKLVEYDALLLDRFLDILQDLHGEDIRQTVQDCYELSAEYEGEHKPEKLEELGNMLTGLDAGDSIVIAKSFSHMLNLANLAEEVQIAYRRRIKLLKKGDFADENSAITESDIEETFKKLVAQLKKTPQEIFDALKNQTVDLVLTAHPTQSVRRSLLQKHGRIRNCLTQLYAKDITPDDKQELDEALQREIQAAFRTDEIRRTPPTPQDEMRAGMSYFHETIWKGVPQFLRRVDTALKNIGINERVPYNAPVIQFSSWMGGDRDGNPRVTPEVTRDVCLLARMMAANMYFSQIEDLMFELSMWRCTDELRVRAHELHRSSKRDAKHYIEFWKQIPPNEPYRVILGDVRDKLYNIRERARHLLANGTSDIPEETTFTNVEQFLEPLELCYRSLCACGDRPIADGSLLDFLRQVSTFGLSLVRLDIRQESDRHTDVMDAITKHLDIGSYREWPEEKRQEWLLSELSGKRPLFGHDLPKTEEITDVLETFRVISELPSDNFGAYIISMATSPSDVLAVELLQRECHVKQPLRVVPLFEKLADLEAAPAAVARLFSIDWYRNRIDGKQEVMIGYSDSGKDAGRLSAAWALYKAQEELVKVAKEYGVKLTMFHGRGGTVGRGGGPTHLAILSQPPDTIHGSLRVTVQGEVIEQSFGEEHLCFRTLQRFTAATLEHGMHPPVSPKPEWRALMDEMAVIATKEYRSVVFKEPRFVEYFRCATPELEYGRMNIGSRPSKRKPSGGIESLRAIPWIFAWTQTRFHLPVWLGFGSAFKHVVEKDPKNLQMLQDMYNQWPFFRVTLDLVEMVFAKGDPGIAALFDKLLVSEELRPFGENLRAKYEETKSFLLQVAGHKDILEGDPYLKQRLRLRDSYITTLNVLQAYTLKRIRDPDYHVKLRPHLSKDYMESSKPAAELVKLNPKSEYAPGLEDTLILTMKGIAAGMQNTG

SEQ ID NO: 35 - DNA, 8638 bp, Saccharum officinarum
  misc_feature (1324)..(1324): n is a, c, g, or t
gatccgtcactgtcctcatgtaatactcacaccctttggatacaaaaatacgagcatacggctatgttttcaagagtacaacaacttctttgccatgtctaccatagcttgcccaatataaaaatcgaacatatctctctagagccaacctccttcattcattattcatgtccatggacaaaccacaaaattcactcgattttcactctagatggtgtgataaatctttatctatctatctgtctgtctaggtagccagctggtttttttttatctgtctgtctatctatctatctattattaaagaataaaactttacttccaactcattttgatttattcccaaaaaatacatgtcctttctttcgtcccattctttttttaaaatgtgttgaatttaatgcaacatacggacacacttgctgacgaacaaaattccgataaaacaaaggtcttgctctcccgacgcgacgggccgccaccatgaaacctgtaggcgagagccgagaggagtaagactatccgcactcgtggtactctaaattcatcatctaaaagcaatatttcattatagtcactcctctataccactttctttcgcactcatccatcctctgtaatcatcctctataccaactaccagctgatggggtccacacgtcatactcttattttctctctcccttcccctctcctccctcttctctctcctctatcttcttttccggctgcttccggttgggcgcagcacacgaggtggggccgccctgggcacgtagcggactgctgcgacatgccaggaatggcggacgatgagtgggtagcggtcggtttgcgtccccggtgcagccgatttgagtcgctatgtccacgctgtccctttagcgctcgtgtatacgtcccggtgcggacggtcttaacgctccactaggatgggctttcaccactggagatgaaaacgaaacagaaatattccgaattgactgttttcgttttctatattatgaaccggttttttaacatgaaaaattgtcagtttcaattggtttcacaatcattttctaccatttttttgtattctttaattgctaaatgtagaaatattccgaaccgaccgtttttatttttctatactgtaagctcgttttcgaccgttttgttcctggttcaccgccacagtccgagttcgaagggatatacgacgaatccatccagcacaagcgacagtcccgtcctgtcctataaatagcagaccacagcagagagagagagagggtgtccctctccgctccgtcacaggaaacccggtatagcatcaaggaangtttttttgtcgtgttgattgatctccctcccctttcgcccccgtcctgcctcctggcctcaccccagaaaaaaaaaggtgagatgctttcctctcctctcccttcgatccagtaggtttgcagtctgtttcctagatcttgtttaggcatttgtccatcttggagtggcaaagtccctagctcccacaacggctgattgctgtaggttttgatcatacttttttttttgcattcgagaaagccccgtgctttgttggaatctgcgtgcttagggctgggtggatcgtcttctcgcttcaagaacatgtcgaaatccgtggattggagggatttgtggggttttctcttctcttttggttggaattgtgggttttgatctgtgtggattctgttgcagggggcgagaagggaaggggagtgcttgggggggagagaagtagatggcgcgcaatgcggtggacaaggcgacgtccatcgacgcgcagctgcggctgctggccccgcagaagctctccgacgatgacaagcttgtcgagtacgacgccctgctcctcgaccggttcctcgacatcctacaggacctgcacggcgaggacatcagggagacggtatgtaaatgctccaattgtttcctgcccgtggtgctatttgttcctttcttttcggtgctggcaattgatttaggtggtagatagctcgatcatgcttgaaaatctgtttatactgtcatgcatgcatgggtcgcgatagcaggagaatcagacacagcatctgggccttgtccgtgggtgtttctatatggtgatattcttctcatctgttttggtattgcactctggtgatggaaactagtgctgcatttaacaaatcatagtagcactgggggtccacccatttgttctacagttgctgatcaatactgtgctagttcccactttgtgttttctagcttttgaaattggtacatcaccatgatgttcaaaactggtggggttatcatgatgtgtggagcacttgcactataatcatggccttttgatactctcgagttattatgccctttgaactattgttgttgctgatacgaggtagtttgcagatcagatttattgtcttttctatgcataaatagtatgataaaatggtaaaaggccaccttttttacaatgcatagacctatcacgctattttacattatcattttaccactcaagtaagtcccatctccttgcccattttttttgtatatctgcaagccaatctttgcttgacattctgataggtggcttgatttctgtggtcatccgttacacagcaattccagtgtgttcaccaactcactctacattcgataaaatttatacttttttgcaatgccgtaaagtttccctttctcatgaataggtgcaagaatgctatgagttagctgctgagtatgaaaataagcttgaccccaaaatgctggatgagattgggaatgtgctgaccagcttggatcctggagactccattgtcataaccaagtcattctcacacatgcttatcctggcaaacttggctgaggaggtacaaattgcataccgcaggagaataaaactgaagaagggtgactttgttgatgagaactcagcaacaactgaatcagacatcgaggagacattaaagaggcttatgcatcagcttaagaagtcccctctggaggtatttgatgctctcaagaatcaaactgttgacctcgtcctgactgcacatccaactcagtcagtccggagatcactgctccaaaagcatggcaggttagtcttgaagctttctgaattgttagatctcaggatgagatttactcgatggaattgaatatttgctatgcagaaatgttggttctgtttgttctttatgcacatcagagcaatgcaatttgctcacactgaatttcacatactgctttcatagaaaacctgatgtttttttgtccacttttcttttatgtgtaaatattccttgcatggttttgctgtagtctgccttttaagaaacaacagcaatagaaaaaaataatatatttctcgaggcatgttaaatcatacgttatatgtgccttttgatgccttagattcctcacctttcaatgtgcaggataagaaactgtttaactcaactttatgcaaaggacatcactccagatgagaaacaggaacttgatgaagcacttcaaagagaggtaatttgcttagatattttggtatattagtgttgtataatactatctgtgtagtagttaatcaggaaaactttgtcaccttcactaaatatatatttatatgattctaatatcctgttccatttcttatctacagattcaagctgcctttagaacagatgaaatcaggcgggcgcctcctactccgcaggatgaaatgcgtgctggaatgagttattttcatgagactatatggaagggtgtacccaagttcttacgtagggttgacactgctcttaagaacattggcataaatgagcggttgccatataatgcccctatcattcagttttcttcttggatgggtggtgatcgtgatggtgcatggcattctctctccttttttttggatagtatatttgatgatgtgccgaatcatgcaactgtagttcacaagaaagaagtgcatatataactctaaactgatatccacaacagggaatccaagagtcacgccagagattacaagggatgtatgcttgttggctagaatgatggctgctaatttgtataatgcccagatagaagacctaatgtttgaggtaaaaataaggacacagtttttatttgatattgtagtgatattagtctcacaagaattctttttatcgcttgcagttatctatgtggcgctgcagtgacgagttacgtgtaaaggtcgatgagttacaccgatcctccaagaaagatacaacaaaacactatataggtgcagattatattatgatatttttgttaaacttatatattatatcttcaacatccttgcctaccatctgctgcaaaatatttaaccaaactagtcgccaatctgttctttccaatggatgaaatagctacacattttataaagtacctccatccagaaaagagtgcagttctagttctactcttagtcaaacaatctaaagtttgaccaagttcatagaaaagaatatcaataattatgacaccaaataggtatactatgaaaatatatttcatgacaaatctaatgatacttatttggtatcataaatattgatatttttttggcacaaagttagtcaaacttgagatggtttgacttagtcataaatatatttggtatccagaattgcattcttttccggatgaagggagtatcttacttatgattaatatatggatcctcatcataaccataaatgtggttccactatgctgctgaagattaatctgagacatgcagatcaggattctaatctaaatggttctaacccaagtcagcaattggggaaaaaataggcatggcaaatccatattccaaaagggttggactgtaagaatcagaaacagttaaaagggcagacccagtgccagaggctcccacacgagtggggtctagggaaaggaataaccgaagtaaagtcttacctccgcagaaattctacagagagaaacagttaccttgcaaaaaaaaaggcattgaaggatttgaaacatgcaataaaactaatgtatttagctgttagcttaataaatatgatcatgaagtattaagaaatagctgtcatcaggactcaggagttgcattgatatatgtgctttcttgccaacataggctggmatttgaatcatgtttcgttctcttgatttgtttctgagacacgtggatgtctatttctgtcgttgtactattttaatattggaaagaaccatgtcactatggagtaatttttttaaagacaaattcttgctattttcatgcagactttgatatttaggatgacatttttggcagcaacagacatgatattgatgcatgctatttttgtctattcttttagattaatgcagccaattagacaaaactaggtgaagttaatacatgctgacatgcttttccatgcagagttctggaaacaagttccccccagtgaaccttaccgtgtgattctgagtgatgtcagagataaactctacaacacgcgtgaacgagcacgccatttattagctagtgggttttctgaaattccagaggaagcaaccttcaccgatgttgaacaggtatgtaaagtgaaaacagtagtgttcatttgatgttcctggctaggataaaaaattaatctgtaccatacacttttagtcctatattaagattggattctttcattctatggtgtactgtaaaaggttgaaacattcccaagataaaggatctttgtagctgtttcaggatatattatgttttatgaattcttgtctcgattgaatcttttttctcttgcagttcttggagcctcttgagctctgttacagatccctctgtgcctgtggtgatcgctctgttgcagatggaagccttcttgacttcttacggcaagtgtctacgtttggactatcccttgttagacttgatatcaggcaagaatctgaccgacatactgatgttatggatgctataactgaatacctcggcattggatcataccgtaaatggacagaggagaaacgccaagaatggctactctcggaacttaatggaaagaggccgttatttggtcctgaccttcccaagtcagatgagattgctgatgttctagatactttccacgtattagctgaacttccttcagacagctttggtgcatatgtaatatctatggcgacagctccctcagatgttcttgctgtcgagctcttgcagcgtgaatgtcatgtgaaaaaaccactgagagttgtgccattgttcgaaaaactggcagatcttgaggcagcacccgcagctttagctcggctgttctctgttgaatggtacagaaacaggatcaatggcaagcaggaagtgatgatcgggtattcagattctggcaaggatgctggtcgtttctctgctgcttggcaactgtacaaggctcaagaggagctaattaatgttgctaagctgtatggggttaagttaactatgttccacggacgaggtgggactgtgggaagaggtgggggccctacccatcttgctatactgtcacaacctcctgaaactattcatggatcacttagggtaactgttcaaggtgaagtcattgagcaatcttttggagaggagcatttgtgctttagaaccctgcaacgtttcacagctgctactcttgaacatggtatgcatcctccaatttcgccaaaaccggaatggcgtgctttaatggatgaaatggctattgttgccacaaaggaataccgatcaattgtatttgaagaaccacgctttgttgaatatttccgccttgtaagtcttcggttttctttgcttgtgttttccttttgaacacacctttacttgtctttatattgttattatgcaattaccactatgagattttaattgtagcttttatttaggccttggtatttcactcttgtttttgttagttgggaattcatctagctagtcctgaagattaatatactgtttcatttcgtttgttttactgtcatgtcattactccttgtagtaccctataaatttattattttttggtaatgggtccatttttctgcataactaatcctggcatttgtgtctttctttcaaataggcaacaccagagatggaatatggtaggatgaatattggaagcagaccatcgaaaagaaagccaagtgcaggcattgaatcactgcgtgcaatcccttggatctttgcttggacgcagactcggttccacctaccagtgtggcttggttttggagcggcattcaagcatgtcttggataaggacatacggaatcttcaaacccttcaagagatgtacaatcagtggccatttttcagggttacaatagacttggttgagatggtgtttgccaaaggcgatcctggtatagcggctctgtatgacaagcttctagtttcagaggatttgtggtcattcggcaagcgtcttagagccaactatgaagaaacaaagcaacttcttctacaggtgatttgtctaagatcttcttgcattcgttatggactgctagagttgcatgtagactatgtgatgcctctaccaggcttgaacattggtgcgtctgaatgagttgataattaagttaatccgtaatctatagccacatcatgcccaactatttccagagaatgtttagatacaagctcaaactggtagataaaccaaggaggaaatggttctggcaataggatgtccattcaccccgtcttgttcttgtctcacccactgcattgtggcctgctgaatttcaggttgctgggcacaaagaccttctggagggcgacccttacctgaagcagaggctgcgcatccgtgactcctacatcactgccctgaacgtgtgccaagcttacatgctgaagcgcatcagggaccctggcttccaggtgaacccggggcctcacctgtcgaaggacatcatggacatgggcaagccggcctcggagcttgtgaagctcaacaccacgagcgagtacgccccgggactggaggacaccctcatcctgaccatgaagggcatcgctgccggaatgcagaacaccggctgaaagaacaggatccggagtgccttctttattctgagctgatgtatctatcgtagcgtaggggatcatggcgtgaaccggttaacaagacgggggtgcacacctggatatgggggattacctgttttagcagtagtagtatttacttttatgctatgctctatcgaaactcctatgtatgcatatccatgttgcttgagcctgcactagcttttggatcatagcttgttaagtaatgcgcagggcatcttgttacggtgaaataactctgtgcttgtgcttggtgctgggctgctggcatatttgtgccgaggagtctactgaattgcatggatcattgtaccttttctgtcgtgcggtatcttgtcgaatactactgtcctgggctaacggacaggctgtagagactagatgcgcacgtcgtgtatcacgcacgcacaacggccccctggaaactgcggaggcccggagccctcggacgtgcacgcgcaaacaggggctttgtcaaaattcaatttttcttctaat

SEQ ID NO: 36 - protein, 966 aa, Saccharum officinarum
MARNAVDKATSIDAQLRLLAPQKLSDDDKLVEYDALLLDRFLDILQDLHGEDIRETVQECYELAAEYENKLDPKMLDEIGNVLTSLDPGDSIVITKSFSHMLILANLAEEVQIAYRRRIKLKKGDFVDENSATTESDIEETLKRLMHQLKKSPLEVFDALKNQTVDLVLTAHPTQSVRRSLLQKHGRIRNCLTQLYAKDITPDEKQELDEALQREIQAAFRTDEIRRAPPTPQDEMRAGMSYFHETIWKGVPKFLRRVDTALKNIGINERLPYNAPIIQFSSWMGGDRDGNPRVTPEITRDVCLLARMMAANLYNAQIEDLMFELSMWRCSDELRVKVDELHRSSKKDTTKHYIEFWKQVPPSEPYRVILSDVRDKLYNTRERARHLLASGFSEIPEEATFTDVEQFLEPLELCYRSLCACGDRSVADGSLLDFLRQVSTFGLSLVRLDIRQESDRHTDVMDAITEYLGIGSYRKWTEEKRQEWLLSELNGKRPLFGPDLPKSDEIADVLDTFHVLAELPSDSFGAYVISMATAPSDVLAVELLQRECHVKKPLRVVPLFEKLADLEAAPAALARLFSVEWYRNRINGKQEVMIGYSDSGKDAGRFSAAWQLYKAQEELINVAKLYGVKLTMFHGRGGTVGRGGGPTHLAILSQPPETIHGSLRVTVQGEVIEQSFGEEHLCFRTLQRFTAATLEHGMHPPISPKPEWRALMDEMAIVATKEYRSIVFEEPRFVEYFRLATPEMEYGRMNIGSRPSKRKPSAGIESLRAIPWIFAWTQTRFHLPVWLGFGAAFKHVLDKDIRNLQTLQEMYNQWPFFRVTIDLVEMVFAKGDPGIAALYDKLLVSEDLWSFGKRLRANYEETKQLLLQVAGHKDLLEGDPYLKQRLRIRDSYITALNVCQAYMLKRIRDPGFQVNPGPHLSKDIMDMGKPASELVKLNTTSEYAPGLEDTLILTMKGIAAGMQNTG

SEQ ID NO: 37 - DNA, 3522 bp, Pinus abies
gcttgtcctaacaatagaaacatggctttgagcatctcaacctggatcttgaaataacttccgagcccgagatcattgaaactttgaagaaatcgtgttgttgaatttttattgttgcagaggaaagatcagaattttgagattttggcgaagcggaacttggatttaggagaaatctgttgcagagatggcgcgcaacaacttggagaagatggcatccattgatgcccagatgaggctcttggttcctggaaaagtttctgaggatgacaagttgattgagtacgatgcccttctactggatcgcttccttgacatcctgcaggacttacatggagaagatatcagggcgatggttcaagaatgctatgagcgttctggtgaatatgagggaaagaatgatcctcacaagctggaagagttgggaaatgtattaacaagtctggatcctggggattcaattgttgtggccagctcattttcccacatgcttaatttagctaatttagctgaagaagttcagattgcttaccggcgccgaaataaaataaagaggggcggctttgcagatgaaagcaatgcaactactgaatcagacattgaagaaacttttaaaaggcttgtaaaccagttaggaaaatcaccggcagaggtgtttgatgctcttaagaatcagactgttgatttggtgttgacagcacatccaacacagtcagtccgcagatcattgctgcagaagcatgctaggattcggaattgcttgtctcagttatatgggaaagatattacccctgatgagaagcaggagcttgatgaagctttgctaagagagattcaagctgccttccgcacagatgaaattcggcgtactcctcctactccacaagatgagatgcgagcaggaatgagctattttcatgaaacaatttggaagggtgtccctaagtttttacgccgtattgatactgccctgaagtcaattgggatcaatgaacgagtgccgtataatgcacctcttatacagttttcttcatggatgggaggtgatcgagatggaaatcctagggtaactccagaagtaacaagagatgtatgcttacttgcaagaatgatggcagcaaatttatattattcccagatagaggatcttatgtttgagttgtccatgtggcgttgtagtgatgagctgagagcacgagccctacaactccatagtgcatcaaagaaagatgcaaagcattacatagaattttggaaacagattcctccaaatgaaccttttagggtgatattgggagatgtacgagataaattgtacaatactcgagaacgtactcgccaattactttctaatggaatttctgacataccagaggaagtaacctttacaaatattgacgagtttttggagccacttgaactttgttaccgatcactgtgttctactggggaccagccaattgcagatggcagtcttcttgattttatgcgtcaagtttcaacatttggtttgtcatttgttaagctggatattagacaggaatctgacagacacagtgatgttgctgatgcaattacaaggcatttaggcattggatcctacaaagagtggtcagaggaacaacgacaagcatggctcttgtcagaactgcaagggaaacgtcccttgtttgggccggacctcccaaagacagatgaggttcgagatgttctagacacatttcatgtaatatctgagcttcctgctgacaattttggagcttatattatttcaatggcaactgcagcatcagatgttttagtggttgagttattacaacgggaatgccatgtgaaaaaaccattacgtgttgtaccattatttgagaagcttgcagatctagaggctgctcctgctgctttggctagattgttttcaataaactggtacagaaacagaattgatggaaagcaagaagtcatgattggttactctgattctggaaaggatgctggtaggttgagtgcaggttgggctttgtacaaagcacaggaagaccttataaaggttgctaaagaatttggtattaagttgacaatgttccatggtcgtggaggaactgtaggcagggggggaggcccaacccatctggccatattgtcacaacctccagacacaattcatggctcttttcgggtcactgttcaaggggaagtcatagaacagtcatttggtgaggaacatttgtgtttcagaactctccaacgatttactgctgccactcttgagcatggaatgcggcctccagttgcaccaaagcctgagtggcgtgaactgatggatgaaatggctgttgttgctacgaaggagtacaggtcaattgttttccaggacccaagattcgttgaatatttccgttctgcaacaccagaattggagtatggtcgaatgaacatcgggagtcgcccctcaaaaaggaagccaagtgggggcattgagtcactccgtgccatcccatggatatttgcttggacacaaactcgatttcatcttcctgtttggcttggatttggtgcagcattcaagcatgttatggagaaggatataagaaatctccatatgctgcagcagatgtacaatgaatggccattctttcgggttacaattgatctaattgaaatggtttttgcaaaaggtgatccagggatagctgctttgtatgacaaactactggtatctgatgatttgtgggccattggtgaaaaattgagagctaactatggtgaaaccaaagatttgctactgcaggttgctggacataaagatctacttgaaggtgatccatacttgaaacagcgactcagacttcgtgactcatacattacaactctgaatgtttgtcaggcttatactttgaaaagaattagagaccccaactatcatgttaatcttaggcctcatttgtcgaaggaaagttcaaccaaaccggcagctgaattggtcaaactgaatccaacgagtgagtatgcaccaggtctggaggatacattgattctaaccatgaagggcatagcagctggtatgcagaacactggttagaaggattttggaaacggatcaggcattttctcatgttaggagtcaggactataacggaagtttcttgagacctacttctgagggaccttcttcagattccagtatttaaggcagcttctaaatatgtcaaagcaccagcaagaatgatctgccagtgtagatatggtcatttaataagctcgagaagagagcaaatgttggttgtcagttgacaactttcaaggattttattataacgagtctaggatcatatatgatcttaggatccctaatatatatgaaaagccctaaaacatgtagttttgtgaactggacttgaggaccaggactcctttatatgcaaggcttgggaagtacaatgatttaacttgatgaatgcattaataatgatctttagcatgctgttgtttgtggcaaaaaaaaaaaaaaaaaaaaaaaaaaaa

SEQ ID NO: 38 - protein, 963 aa, Pinus abies
MARNNLEKMASIDAQMRLLVPGKVSEDDKLIEYDALLLDRFLDILQDLHGEDIRAMVQECYERSGEYEGKNDPHKLEELGNVLTSLDPGDSIVVASSFSHMLNLANLAEEVQIAYRRRNKIKRGGFADESNATTESDIEETFKRLVNQLGKSPAEVFDALKNQTVDLVLTAHPTQSVRRSLLQKHARIRNCLSQLYGKDITPDEKQELDEALLREIQAAFRTDEIRRTPPTPQDEMRAGMSYFHETIWKGVPKFLRRIDTALKSIGINERVPYNAPLIQFSSWMGGDRDGNPRVTPEVTRDVCLLARMMAANLYYSQIEDLMFELSMWRCSDELRARALQLHSASKKDAKHYIEFWKQIPPNEPFRVILGDVRDKLYNTRERTRQLLSNGISDIPEEVTFTNIDEFLEPLELCYRSLCSTGDQPIADGSLLDFMRQVSTFGLSFVKLDIRQESDRHSDVADAITRHLGIGSYKEWSEEQRQAWLLSELQGKRPLFGPDLPKTDEVRDVLDTFHVISELPADNFGAYIISMATAASDVLVVELLQRECHVKKPLRVVPLFEKLADLEAAPAALARLFSINWYRNRIDGKQEVMIGYSDSGKDAGRLSAGWALYKAQEDLIKVAKEFGIKLTMFHGRGGTVGRGGGPTHLAILSQPPDTIHGSFRVTVQGEVIEQSFGEEHLCFRTLQRFTAATLEHGMRPPVAPKPEWRELMDEMAVVATKEYRSIVFQDPRFVEYFRSATPELEYGRMNIGSRPSKRKPSGGIESLRAIPWIFAWTQTRFHLPVWLGFGAAFKHVMEKDIRNLHMLQQMYNEWPFFRVTIDLIEMVFAKGDPGIAALYDKLLVSDDLWAIGEKLRANYGETKDLLLQVAGHKDLLEGDPYLKQRLRLRDSYITTLNVCQAYTLKRIRDPNYHVNLRPHLSKESSTKPAAELVKLNPTSEYAPGLEDTLILTMKGIAAGMQNTG

SEQ ID NO: 39 - DNA, 3158 bp, Lotus japonicus
  misc_feature (3088)..(3088): n is a, c, g, or t
gggtttgtgaagttacaatggcgaacaggaacttggagaagatggcatccattgatgctcagcttcggcaattggttcctgctaaagtcagcgaggatgataagctggttgagtatgatgctctgctactggatcggttccttgatattctccaggatttacatggggaggatctgagagaaactgttcaagaagtatatgagctttctgctgagtatgaaagaaagcatgaacctcagagactggaagtacttggaaatctgataactagtttggacgctggagattccattgttgttgccaagtcctttgcccacatgcttaatttggcaaacttagctgaagaggtccagattgctcaccgccgtaggatcaagttgaaaaagggggatttcgctgatgagggcaatgcaaccactgaatcagatattgaagaaactttcaagaaacttgtaggtgaaatgaagaagtctcctcaggaagtttttgatgaactgaaaaatcagactgttgatctggttcttactgctcatcctactcaatcagttcgtagatctttgctgcagaagcatggaaggatacgaaattgcttaactcaattgtatgccaaagacatcactcctgatgataagcaggagcttgatgaggctctacagagagagatccaagctgctttccgtactgatgaaatcaggagaaccgctccaacaccacaagatgaaatgagagcagggatgagctactttcatgaaacaatttggaagggtgtgcccaaatttctgcgtcgtgttgatacagctttgaagaatatagggattaatgagcgtgtcccgtataatgctccacttattcaattttcttcttggatgggtggtgatcgtgatggcaatccaagagtaactcctgaagtgacaagggatgtttgcttattggctagaatgatggctgctaatttgtattattcacagattgaggatcttatgtttgaactgtccatgtggcgctgcaatgatgagctgcgtgtccgggctgaggaacttaccagttcttccaataaagatgcagttgcaaaacactacatagagttttggaaaaacattcctccaagtgaaccgtatcgtgtggtactgggtgaagtaaggaacagactctaccagactcgtgagcgttctcgccatttgcttgctaatgagtactctgacattctagaggaacacactttcactaatgtggaggagttcctggaacccctcgagctctgttatagatcactttgtgcctgtggtgatcgggcaattgctgatggaagccttctagattttttgaggcaagtctctacttttggactgtccctagttaggcttgatattaggcaagagtccgaccgtcttactgatgtgctggatgccatcaccaaacatttgggaatcggctcctacctggaatggtctgaagaaaagcggcagcaatggcttttgtccgagttgagtggcaaacgccctctctttggacctgatcttccccaaactgaagagatcaaagatgttctcgacacatttcatgtcatagcagaacttccatctgataactttggagcatatatcatatcaatggcaactgcaccatctgatgtgcttgcagttgaactcctgcaacgtgaatgccatgtcaagaatccgttaagagtcgtcccattgtttgagaagcttgctgatctggaaacagctcccgctgctttggctcggttgttctccgttgagtggtaccgaaaccggatcaacgggaaacaagaagtcatgattggctattctgattcaggtaaagatgctggaaggttctctgcagcgtggcagctatataaggctcaagaagagcttattaaggtagctaaggaatatggtgttaagctaacaatgttccatggtcgtggagggactgtcggcagaggaggcggtcctactcaccttgctatcctgtctcagcctccagacacaatccatggatcactccgtgttactgtccaaggagaagttatcgagcagtcatttggagaggagcacttgtgtttcagaacccttcaacgttacactgcagctactctagaacatggaatgcatcccccaatttcccccaaaccagaatggcgtgctttgatggacgagatggctgttattgccactgaggaataccgttctattgtattcaaagaaccccgttttgttgagtatttccgcctggctacaccggagttggagtatggccgaatgaatattggaagtcggccggcaaagagaaagcctagtggaggcattgagacgctccgcgctataccttggatctttgcctggacacagacaaggtttcaccttccagtgtggctagggtttggggctgcattcaaacatgtgattgcaaaggatatcagaaatcttaacatgctgcaagagatgtacaatcaatggcctttctttagggtcactattgatttagtggaaatggtgttcgccaagggagaccccggtatagctgctttgtatgacaggctccttgtttcagaagatttgtggtcatttggggaacagttgaggaccatgtttgaagaaactaagcaactgctacttcaggtggctgcacacaaggatcttcttgaaggtgatccttacttgaaacaaagactccggttgcgtgattcttacatcactaccctcaatgtgtgccaagcttacacattgaagcgaatccgcgatccgaactataatgtgaagctacgcccccacatctctaaagaggctatagacgtgagtaaacctgcggatgaacttgttactctgaacccaacaagtgaatatgcacctggtttggaagacaccctcattctcaccatgaagggtattgctgccggcatgcaaaacactggttaaatctgagagattctacttctgttttctgttctcctgttttatcaaaataatgaatttagatacgactcacccaaagagggtgtttgttttccttttcccagttgaaatatcatttgatataaattatgtttccatgctttgctatataaagcatcgtttggctgctntgaaacaatgattaatgccagtatgcaactgattatgttttaactgaaaaaaaaaaaaaaaaaaaaaaaa

SEQ ID NO: 40 - protein, 967 aa, Lotus japonicus
MANRNLEKMASIDAQLRQLVPAKVSEDDKLVEYDALLLDRFLDILQDLHGEDLRETVQEVYELSAEYERKHEPQRLEVLGNLITSLDAGDSIVVAKSFAHMLNLANLAEEVQIAHRRRIKLKKGDFADEGNATTESDIEETFKKLVGEMKKSPQEVFDELKNQTVDLVLTAHPTQSVRRSLLQKHGRIRNCLTQLYAKDITPDDKQELDEALQREIQAAFRTDEIRRTAPTPQDEMRAGMSYFHETIWKGVPKFLRRVDTALKNIGINERVPYNAPLIQFSSWMGGDRDGNPRVTPEVTRDVCLLARMMAANLYYSQIEDLMFELSMWRCNDELRVRAEELTSSSNKDAVAKHYIEFWKNIPPSEPYRVVLGEVRNRLYQTRERSRHLLANEYSDILEEHTFTNVEEFLEPLELCYRSLCACGDRAIADGSLLDFLRQVSTFGLSLVRLDIRQESDRLTDVLDAITKHLGIGSYLEWSEEKRQQWLLSELSGKRPLFGPDLPQTEEIKDVLDTFHVIAELPSDNFGAYIISMATAPSDVLAVELLQRECHVKNPLRVVPLFEKLADLETAPAALARLFSVEWYRNRINGKQEVMIGYSDSGKDAGRFSAAWQLYKAQEELIKVAKEYGVKLTMFHGRGGTVGRGGGPTHLAILSQPPDTIHGSLRVTVQGEVIEQSFGEEHLCFRTLQRYTAATLEHGMHPPISPKPEWRALMDEMAVIATEEYRSIVFKEPRFVEYFRLATPELEYGRMNIGSRPAKRKPSGGIETLRAIPWIFAWTQTRFHLPVWLGFGAAFKHVIAKDIRNLNMLQEMYNQWPFFRVTIDLVEMVFAKGDPGIAALYDRLLVSEDLWSFGEQLRTMFEETKQLLLQVAAHKDLLEGDPYLKQRLRLRDSYITTLNVCQAYTLKRIRDPNYNVKLRPHISKEAIDVSKPADELVTLNPTSEYAPGLEDTLILTMKGIAAGMQNTG

SEQ ID NO: 41 - DNA, 3189 bp, Nicotiana tabacum
aaaaattgtccacttgtaggaaaggagattattggggttgttgatagtgtgaaaaatggcgacacggagtttggagaaattggcatcaattgatgcacagttaagggcattggttcctggcaaagtttctgaggatgataagttggttgagtatgatgctttgcttttggatcggtttcttgatattcttcaggatttacatggggaagatcttaaggaaacggtccaagaatgttatgaactttctgcggaatacgaaggcaagcacgatccaaagaagctggaggagcttggaaatgtgttgacaagtttggatccaggggattccattgtcattgctaaagctttctctcacatgcttaatttggccaacttggccgaggaggtgcagatcgcctaccgtcgacgacaaaagttgaaaaggggggactttgctgatgagaacaatgcaacaactgaatcagatattgaagaaactttcaagaaacttgtaggggacttgaaaaagtctcctcaagaagttttcgatgctctgaaaaatcagactgtggatttagtcttaactgctcatcctactcaatctgtccgaagatctttgcttcaaaagcacggaaggatccgagattgcttggctcagttgtatgctaaagacattacacccgatgataaacaagagctcgatgaggctttacagagggagattcaagctgctttccgcactgatgaaattcggaggactgctccaactccacaagatgaaatgagagctggaatgagctactttcatgaaactatttggaagggtgttccaaagttccttcgtcgtgttgatacagctcttaaaaacatagggattaacgaacgacttccttacaatgctcctcttattcaattctcctcttggatgggtggtgaccgggatggcaatccaagagtgactcttgaggtcacaagagatgtctgcttactagcaagaatgatggcagcgaatttgtactattcgcaaatagaggaactcatgtttgagttatctatgtggcgttgcaatgatgaccttcgtattcgagcagctgaactttacaggtcctcaaggagggacactaagcactacatagaattttggaaaacaattccgccaagtgaaccataccgtgtaattcttggcgatgtgagagataagctgtatcagacacgtgagcgtactcgccaaatgttagcccatggaatctctgatattcctgaggatgcaacttataataatgttgagcagttcttggaacctcttgaactctgctacagatctctttgtgaatgtggtgatcgccccattgccgatggaagccttctggattttcttagacaagtttctacctttggactctcatttgttagacttgacataagacaagagtcagaccgccacactgacgtccttgatgccattacccagcacttggaaatcggttcatatcgagagtggtctgaagaacgtagacaggagtggcttctttctgaactcagcggcaagagacctttatttggacctgatcttccaagaaccgaagaaattgctgacgtcttggatacgctccatgtcatagcagaacttccatctgactgcttcggggcatatatcatctcaatggccactgcaccatctgacgtgcttgcagttgagctcctacagcgtgaatgccatgtgaagcaacctttacgagtggttccacttttcgaaaagttggatgatctggagtctgcgtctgcggctgttgcacgtctcttttcgattgagtggtacagaaaccggattaacggtaaacaagaggtcatggtcgggtattcagactctggcaaggatgctggtcgtttctcagcagcgtggcagctatataaggctcaagaggagcttataaaagttgccaaagaacatggtgtgaagctaactatgttccacggtagaggtggtacagtaggaagaggaggtggccccacccatcttgctatattgtctcagccaccagatacaattcagggatctctccgtgtcacagttcagggtgaagttatcgagcaatcgtttggggaggaacacttgtgttttaggactctccaacgtttcactgctgctacccttgaacatgggatgcatccacccgtctctcccaaaccagaatggcgtgcacttatggatgaaatcgcggttattgctacagagaagtataggtcaatagttttcaaagaacctcgatttgttgagtattccgccttggccacacctgagttagagtatggtcgaatgaacattggaagccgtccatcaaagcgtaaacctagtggaggaatagaatcactcagagctattccatggatctttgcctggacgcaaactaggtttcatctccccgtctggcttggctttggggcggcatttaagtatgccattgacaaggatataaaaaaccttcgcatgtttcacgaaatgtacaatgaatggccattctttagagtcactattgacttggttgagatggtgttcgccaagggaaaccccggtattgcagctttgtatgacaagcttctcgtttcagaagatttgttgcctttcggcgagcttttgaggtccaactacgaggagacaaggagcctcctactccagattgctggacacaaggatcttctggagggagacccctacttgaaacaacgactcaggctgcgtgattcctacatcacaaccttaaacttgttgcaagcctacactctcaagcgtatacgtgatcctaactatcatgtcacgctaaggcctcatatttcgaaggattacatggaatcgaagtcagctgctgaacttgtgcagctgaacccgacaagtgaatatgcccccggcttggaggacacactcatcttgacaatgaagggtattgctgctggactgcagaataccggttaaactcattctgatgttcgtgttttttctaattttttatatactcgaaaagcatcattctggtttatgagaggtagatgtttttcatttctgttgtgttttgtggtggtgaaagttttttattccaccctatatatcatgtttgataaaactaataagactccatttgagtgaggtttacttcaccaaaatgaactgtaatctcattgttggctcaatggaatatcaagtttcttagatca

SEQ ID NO: 42 - protein, 964 aa, Nicotiana tabacum
MATRSLEKLASIDAQLRALVPGKVSEDDKLVEYDALLLDRFLDILQDLHGEDLKETVQECYELSAEYEGKHDPKKLEELGNVLTSLDPGDSIVIAKAFSHMLNLANLAEEVQIAYRRRQKLKRGDFADENNATTESDIEETFKKLVGDLKKSPQEVFDALKNQTVDLVLTAHPTQSVRRSLLQKHGRIRDCLAQLYAKDITPDDKQELDEALQREIQAAFRTDEIRRTAPTPQDEMRAGMSYFHETIWKGVPKFLRRVDTALKNIGINERLPYNAPLIQFSSWMGGDRDGNPRVTLEVTRDVCLLARMMAANLYYSQIEELMFELSMWRCNDDLRIRAAELYRSSRRDTKHYIEFWKTIPPSEPYRVILGDVRDKLYQTRERTRQMLAHGISDIPEDATYNNVEQFLEPLELCYRSLCECGDRPIADGSLLDFLRQVSTFGLSFVRLDIRQESDRHTDVLDAITQHLEIGSYREWSEERRQEWLLSELSGKRPLFGPDLPRTEEIADVLDTLHVIAELPSDCFGAYIISMATAPSDVLAVELLQRECHVKQPLRVVPLFEKLDDLESASAAVARLFSIEWYRNRINGKQEVMVGYSDSGKDAGRFSAAWQLYKAQEELIKVAKEHGVKLTMFHGRGGTVGRGGGPTHLAILSQPPDTIQGSLRVTVQGEVIEQSFGEEHLCFRTLQRFTAATLEHGMHPPVSPKPEWRALMDEIAVIATEKYRSIVFKEPRFVEYSALATPELEYGRMNIGSRPSKRKPSGGIESLRAIPWIFAWTQTRFHLPVWLGFGAAFKYAIDKDIKNLRMFHEMYNEWPFFRVTIDLVEMVFAKGNPGIAALYDKLLVSEDLLPFGELLRSNYEETRSLLLQIAGHKDLLEGDPYLKQRLRLRDSYITTLNLLQAYTLKRIRDPNYHVTLRPHISKDYMESKSAAELVQLNPTSEYAPGLEDTLILTMKGIAAGLQNTG

SEQ ID NO: 43 - DNA, 3048 bp, Glycine max
ttttaggtgagggactgaaaggtagcaatggcgaccaggaacttggaaaagatggcatccattgatgcacagcttaggcaattggctcctgccaaagtgagtgaggatgacaaactgattgagtatgatgctcttctgctggatcggttccttgatatccttcaagatttacatggggaggatctgaaggaaacagttcaagaagtgtatgaactttcagctgagtatgaaggaaagcatgaccctaagaaactggaagaacttggaaatttgataaccagtttggatgctggggactctattcttgttgccaagtccttttcccacatgcttaatttggccaacttggctgaagaggtccagatttctcgccgccgaagaaacaagttgaagaaaggggattttgcagatgagaacaatgcaactacagaatcagacattgaagaaactctcaagaaacttgtatttgacttgaagaagtctcctcaggaagtttttgatgcactgaaaaaccagactgttgatttggttcttactgctcatcctactcaatcaattcgtagatctttgcttcaaaagcatggaaggataaggaattgtttatctcaattgtatgccaaagacattactcctgatgataagcaggagcttgatgaggctctacaaagggagattcaagctgccttccgtacagatgaaatcaggaggacccctccaacaccacaagatgagatgagagcagggatgagctacttccatgaaacaatttggaacggtgttcccagatttctgcgccgtgtagacacagctttgaacaatatcgggattaaagagcgtgttccttataatgctccccttattcaattttcttcttggatggggggtgatcgcgatggtaatccaagagtaactcctgaagtgacaagggatgtttgcttattggctagaatgatggctgctaatttgtattattcccagatagaagatcttatgtttgagctctctatgtggcgctgcaatgatgaactacgcgttcgtgcagaagaacttcacaggtcttccaagaaagatgaagttgcaaaacactatatagaattttggaaaaaggttcccccaaatgaaccatatcgtgtggtactcggtgaagtaagggataggctctatcagactcgtgagcgttctcgccatttgctttctaatgggtactctgacattccagaggaagccactttcaccaatgttgaggagttcctggaatctcttgaactatgttacagatcactatgtgcttgtggtgatagagcaattgctgatggaagccttcttgatttcatgagacaagtctccacttttggactgtcactagtgaggcttgatatcaggcaagagtcagatcgtcacactgatgtgctggatgccattaccaaacacttggaaattggctcgtaccaggaatggtctgaagagaaaagacaggaatggttgttgtctgagttaagtggcaaaaggcctctatttggacctgaccttcctcaaactgaagaaattagagatgttttggacacatttcatgtcatagcagaactaccaccagacaactttggagcctatatcatatcaatggcaactgcaccatctgatgtgcttgcagttgagcttctacaacgtgaatgtcacatcaagcatcccttaagagttgtgccattgtttgagaagctagctgatctagaggctgctcctgctgctctggcacggttgttctcgatagactggtacagaaataggatcaatgggaagcaagaagtgatgattggatactcagattcagggaaagatgctgggaggttctctgcagcatggcagctatataaggctcaggaggaacttataaatgttgccaagaaatttggtgttaagctaaccatgttccatggtcgcggtggaactgttggaagaggaggtggacctactcatcttgctattctgtctcaacctccagacacaatccatggatcacttcgtgtgacagtccaaggtgaagtcattgagcaatcatttggagaacaacacttgtgctttagaacactacaacgtttcactgccgccactctagaacatggcatgcaccccccaatttcgccaaaaccagaatggcgtgctttgatggatcagatggctgtcattgctactgaggaataccgttccattgtattcaaggaaccacgctttgttgagtatttccgcctggctacaccagagttggagtatggaaggatgaatattggaagtcgaccagcaaagagaagacctagtggaggcattgaaacactgcgtgcaataccttggatttttgcatggactcagacaaggtttcatcttccagtgtggctaggctttggagcagcatttaaaaaagtcattgaggaaaatgttaagaatctcaatatgctgcaagagatgtacaatcaatggcctttctttagggtcacacttgatttggtggaaatggtgtttgccaaaggagatccgaaaattgccgctctgaatgatagactccttgtttcaaaggatctgtggccgtttggggatcaattgaggaacaaatatgaagaaactaggaaactcctacttcaggtggctggacacaaggaaattcttgaaggggacccttacttgaagcaaagactcaggcttcgtcatgctcccattaccaccctcaatattgtccaagcttacacattgaaacgtatccgtgatcctaactacaatgtgaaggtgcgcccccgcatatcaaaggaatctgcagaggcaagcaaatcagctgatgaacttgtcaaattgaacccaacaagtgaatatgcccctggtttggaagacacactcattctcactatgaagggtattgctgctggcatgcagaacactggttaagtttgtttgaatactgaaagtgagtgctctgagttttgctcacagaatacactttttttgttttgttattatgttgccccacctttctgtacaatttggtatgctgctctagaattc

SEQ ID NO: 44 - protein, 967 aa, Glycine max
MATRNLEKMASIDAQLRQLAPAKVSEDDKLIEYDALLLDRFLDILQDLHGEDLKETVQEVYELSAEYEGKHDPKKLEELGNLITSLDAGDSILVAKSFSHMLNLANLAEEVQISRRRRNKLKKGDFADENNATTESDIEETLKKLVFDLKKSPQEVFDALKNQTVDLVLTAHPTQSIRRSLLQKHGRIRNCLSQLYAKDITPDDKQELDEALQREIQAAFRTDEIRRTPPTPQDEMRAGMSYFHETIWNGVPRFLRRVDTALNNIGIKERVPYNAPLIQFSSWMGGDRDGNPRVTPEVTRDVCLLARMMAANLYYSQIEDLMFELSMWRCNDELRVRAEELHRSSKKDEVAKHYIEFWKKVPPNEPYRVVLGEVRDRLYQTRERSRHLLSNGYSDIPEEATFTNVEEFLESLELCYRSLCACGDRAIADGSLLDFMRQVSTFGLSLVRLDIRQESDRHTDVLDAITKHLEIGSYQEWSEEKRQEWLLSELSGKRPLFGPDLPQTEEIRDVLDTFHVIAELPPDNFGAYIISMATAPSDVLAVELLQRECHIKHPLRVVPLFEKLADLEAAPAALARLFSIDWYRNRINGKQEVMIGYSDSGKDAGRFSAAWQLYKAQEELINVAKKFGVKLTMFHGRGGTVGRGGGPTHLAILSQPPDTIHGSLRVTVQGEVIEQSFGEQHLCFRTLQRFTAATLEHGMHPPISPKPEWRALMDQMAVIATEEYRSIVFKEPRFVEYFRLATPELEYGRMNIGSRPAKRRPSGGIETLRAIPWIFAWTQTRFHLPVWLGFGAAFKKVIEENVKNLNMLQEMYNQWPFFRVTLDLVEMVFAKGDPKIAALNDRLLVSKDLWPFGDQLRNKYEETRKLLLQVAGHKEILEGDPYLKQRLRLRHAPITTLNIVQAYTLKRIRDPNYNVKVRPRISKESAEASKSADELVKLNPTSEYAPGLEDTLILTMKGIAAGMQNTG

SEQ ID NO: 45 - DNA, 5920 bp, Solanum tuberosum
ctataccttattgagtgtccaaagtaaagacttttttttctcatcttttgtgttctgacataccaaaattcaggtactgaacattatttatgttctccaatttgccatactcaaaatttcaatctcttgttttttttgtttttttttgctaacaaataaatcaacaagaatataaaacttagtagagagttgccaactggggtttttgtttgttttgaattgccagaacaagagaaaaaaaagtggtcccttttttgtacttttcttggggtcatgatcagatattgtggtcactgtaatttgtaaaaaaaatttgatgatttttatgtttatgtctattgctgcagagtgttgactgttgagtgagaaatgactacgaggaatttggagaaacttgcatcgattgatgcacagttgaggcaattggtgcctgctaaagtttctgaagatgataaacttgttgagtatgatgctttgcttttggataggtttcttgatattcttcaagatttacatggggaggatctcaaagaaacagtatgcatttttcccaatttatgtttgctgttaatgtaacctatgaatgatttagacaattgtaaattatctacctaagttgtagtcttttatgttgtgtaccctttgatgaagttctgtgatttttgtcttttggttactaaggggttgttgtttttgtcttccacttttaatatggtttatttcttgaagttaaagattggatttttatgtcacttgtaaaaaaggggaataaaaagattggatttttatgtctgttctgactgagttgacttcaaacacttgaattggttactaaagggtgttgtttttgtcttccacttttaatctggtctatttcttgaagtaaaaaagattgaatttttatgtcacttacaaaaaaaggaacaaaaagattggatttttatgtctgttctgactgagtgaactacaaacatttgattctgaggtgtgtgtaatacttagagatggtatcgatataatggtattcatatgcttcagtatagtttgactgtgttagtggatgaaatcccatgtgtatgttgacttgagatcctaaacttgtgttgaccaagtagtcttgttttttcggaatgttttgtcgtgttttctttagtatttgccagatttcttcacttctgttatttctttttcgatcttattttccttaagctgagggtatatcagaaacagtctctctacctctcaaggtaggggtaaggtcttggtacactctaccctccccagaccctacttgtggaattacactgagtatgttgttgtaattgcaaaagactggtcaacatttaagtctttgatattttcaatctcacattaggtccaagagtgttatgagctttctgccgagtatgaagccaagcatgatccgaagaagctggaggaacttggcaatgtgttgacaagtttggacccaggagattcaattgtcattgctaaagctttctctcacatgcttaacttggccaatttggctgaggaggttcagattgcctaccgtaggcgccaaaaattgaagaaaaagggagattttggggatgagagcaatgcaacaactgagtcagatattgaagaaactttcaagaaattggtgggggacttgaagaagtcccctcaagaagtttttgatgctatcaagaatcagactgtggatctggtcctaacagctcatcctacacaatctgtacgaagatcattgcttcaaaagcatggaaggtttggtctttaatcaccatgtttattgtcttcagcagttagagttgtctccttggcttgtcattttatgctagtttgtgcttcgatttttccctaataaatataattggaaatgctcttttcggaccaaattttcgtgctttcgtcggttgtttacttacttgttctaaccaaattttcaggatccgtgactgcttggctcagttgtatgctaaagacattacacccgatgataaacaagaacttgatgaggctttacagagggaggtaactatcgacgtttagttacttgatacatgtgtttttccttgaatgaaattctattattagtaccttcaattctggtgtctttctgactctactaatggatattttggtgcttcaatatcatatagatatgtcttgatctgtcaggccttatattatcaatggacttacttttttcatccctctcatgaagattggagaagcaaaaattatctcataagttacccatttaatagttgccccttcattcatttgaatgattttaccctgtaaaaagtggagctggttatatgattgctctaaaattggatatgaagcaataatagcaatcttcgaactcaaatatgtgtcgcattctgtggatcatggtttattggtatgatgcacccattattcttttttgacaaatatctgctacttacttcctctgtagatccaagctgcgttccgaactgatgagatccgaagaactcctcctactccacaagatgaaatgagagctggaatgagctatttccatgaaacaatttggaagggtgtaccaaagtttctgcgccgtgttgatacagctcttaaaaacatagggattaatgaacgagttccttataatgctccccttattcaattctcctcttggatgggcggtgatcgtgatggtatgattcctttactgtggagaatgtttgcagttactttagctaaaagctgagaaaacaaaataggaattcggattacataattttgaaggggtggaggaaagcaaaatactccttctgcttgaacgtggattacttagttactacatgcagtagataatccttatttatctgtcaactctctgctaccaagtacaggtaatccaagagtgactcctgaggtcacaagagatgtttgcttattggccagaatgatggcagctaacttgtactattcgcaaatagaggacctcatgtttgaggtatccaacaattaaatgtttttgagacttttgtcttggttcaattagtgaaaaaatcgcactatctacactgtgatctttttctaaattgtacaatctttcagttatctatgtggcgctgcaatgaagaacttcgtgtgcgagcagatgatctccaaaggtcttcaaggagagatgaaaaacactacataggtaactaattgaatattgctattaaggttgatccatgaaattgaatcaaagaagagttttctagttgcatataaccttgataggacttttaaatgcgtgtttgaagtatgattcaaattctcctttcaagtgagccaagggtgtctttcatcattgccgatgggaaaaaaaaagggtgagcaaagggtgttattatttatgatttaaagattgagaaaaagaggtcattctagcatctggtatgctgattagaaattgcacgagaagctctctgtattctcttggaaagatgttcctttcttccaaaaaaatctttggacagagaaatcgcataatctgtgatctttcaacattttcttctcatgcagaattttggaagcaagttcctccaaatgaaccctatcgtgtaattcttggtgatgtgagagataagttgtatcagacacgtgagcgtgctcgccaactgttaggccatggatactctgaaattccagaggaagcaacttatactaatattgagcaggttcataatactatacttctgtcttttcctgtgactgctttctatatgtagacccttctaaattaagcagtgaatattcacttgtactcttgaaagcttaactagttttactaaacagcttgacatgttattcatcgaaaaaatgaactagaaaaacatgaggaagtgtgtctctttcttgttgaataacagcataagcatttgcatggttgttctaccaaaccaaaaacatataaatatctgtgttgcatgtcatataacactaatatggtcatcattttatgtagttcttggagcctcttgagctctgctacagatctctttgtgcttgtggtgacctctccatcgcggatggtagccttctggatttcctgagacaagtttctacgtttggactttcacttgtgagacttgacataagacaagagtcggaccgccatactgatgtgcttgacgctattacgcaacatttggaaattggttcatatcgagactggtctgaagaacgtagacaagagtggcttctgtctgaactcagtggcaagagacctttatttggacctgatcttccaaaaactgaagaaattgctgatgttttggatacgttccatgtcatagccgaactcccagcagactgcttcggggcatacatcatctcaatggccactgcaccatctgatgttcttgcagtagagcttctacagcgtgaatgccgagtgaggcaacctttacgagttgttccactttttgagaagttggctgatctggatgctgctcctgcagccgttgcacgtcttttctcaattgagtggtacagaaaccggattaatggcaagcaagaagtgatgattggatactccgactctggcaaggatgcaggtcggctatcagcagcctggcagttatataaggctcaagaggagcttatacaagtcgccaaggagttcgacgtgaagctaaccatgttccatggtagaggtggtacagtgggaagaggaggtggccccgcccatcttgccatattgtctcaaccacccgaaacaattcacggatctctccgtgttacagttcagggtgaggttattgagcagtcttttggggaagaacacttgtgttttaggacactccagcgttttactgctgctacacttgaacatgggatgcatccaccagtctctccaaaaccagaatggcgtgcacttatggacgaaattgcagttgttgcaacagaaaagtatcgatcaatagtttttaaggaaccccgatttgtcgagtatttccgcctggtaagtatgctagcaatgaactcagttattaattgtagatgctgtcacaaatattgccttgagttgtaataagctatttttcattgatcatgtttgcaggccacacccgagttagagtatggtcgaatgaacattggcagccgtccatcaaagcgtaaacccagcggaggcatagaatcacttagagctattccgtggatctttgcttggactcaaactagattccatcttccagtctggctcggctttggagcagcatttaagtatgccattgaaaaggatatcaaaaaccttcgcatgctgcaggaaatgtacaatgcatggcctttctttagggtaactatcgatttggttgagatggtgttcgccaaaggagacccaggcattgctgcattgttcgacaagcttctggtgtccgaagatttgtggtctttcggtgaacttttgaggtcaaagtatgaggagacaaagagcctcctcctgcaggtaatgtgacatatacttctaaaaaggatcggttgaacacttattgtgctcgattgcttcacaaactggttccaagttagtacatctaaacataattttccctttccctttttaaaatagattgctggacacaaggatcttctggagggtgatccatacttaaaacaacgactcaggttgcgtgactcctacatcacaacattgaatgtgtgtcaagcctacaccctaaagcgtattcgtgacccagactatagtgtcacaccaaggcctcacatttccaaggaatacatggaagcaaaaccagctacagaacttgtgaacctgaacccgactagcgaatatgcacctggcttggaggacacactcatcttaaccatgaaaggtattgctgctggaatgcagaatactggttagtcgtcacctggaatatggaagatg

SEQ ID NO: 46 - protein, 965 aa, Solanum tuberosum
MTTRNLEKLASIDAQLRQLVPAKVSEDDKLVEYDALLLDRFLDILQDLHGEDLKETVQECYELSAEYEAKHDPKKLEELGNVLTSLDPGDSIVIAKAFSHMLNLANLAEEVQIAYRRRQKLKKKGDFGDESNATTESDIEETFKKLVGDLKKSPQEVFDAIKNQTVDLVLTAHPTQSVRRSLLQKHGRIRDCLAQLYAKDITPDDKQELDEALQREIQAAFRTDEIRRTPPTPQDEMRAGMSYFHETIWKGVPKFLRRVDTALKNIGINERVPYNAPLIQFSSWMGGDRDGNPRVTPEVTRDVCLLARMMAANLYYSQIEDLMFELSMWRCNEELRVRADDLQRSSRRDEKHYIEFWKQVPPNEPYRVILGDVRDKLYQTRERARQLLGHGYSEIPEEATYTNIEQFLEPLELCYRSLCACGDLSIADGSLLDFLRQVSTFGLSLVRLDIRQESDRHTDVLDAITQHLEIGSYRDWSEERRQEWLLSELSGKRPLFGPDLPKTEEIADVLDTFHVIAELPADCFGAYIISMATAPSDVLAVELLQRECRVRQPLRVVPLFEKLADLDAAPAAVARLFSIEWYRNRINGKQEVMIGYSDSGKDAGRLSAAWQLYKAQEELIQVAKEFDVKLTMFHGRGGTVGRGGGPAHLAILSQPPETIHGSLRVTVQGEVIEQSFGEEHLCFRTLQRFTAATLEHGMHPPVSPKPEWRALMDEIAVVATEKYRSIVFKEPRFVEYFRLATPELEYGRMNIGSRPSKRKPSGGIESLRAIPWIFAWTQTRFHLPVWLGFGAAFKYAIEKDIKNLRMLQEMYNAWPFFRVTIDLVEMVFAKGDPGIAALFDKLLVSEDLWSFGELLRSKYEETKSLLLQIAGHKDLLEGDPYLKQRLRLRDSYITTLNVCQAYTLKRIRDPDYSVTPRPHISKEYMEAKPATELVNLNPTSEYAPGLEDTLILTMKGIAAGMQNTG

SEQ ID NO: 47 - DNA, 3317 bp, Medicago sativa
aaacactgtccttctgatccatttttccattccttgtcatcatcttcttcttcgtatctaactaactgtctggcacacaacacggtgagagagtgaattgctacaatggcaaacaagatggaaaaaatggcatcaattgatgcacagcttagacaattggttcctgcaaaagtgagtgaagatgataaacttattgagtatgatgctttgttgttggatcggtttcttgatattcttcaagatttacatggagaggatctgaaggattctgttcaagaagtgtatgaactgtctgctgaatatgaaagaaagcatgatcctaagaaacttgaagagcttggaaatttgatcacaagtttcgatgcaggtgactcaattgttgttgccaagtccttttcacacatgcttaacttggccaacttagctgaagaggttcaaattgcgcaccgccgaaggaacaagttgaagaaaggtgattttagggatgagagcaatgcaaccactgaatctgacattgaggaaactctcaagaaacttgtgtttgacatgaagaaatctcctcaagaggtttttgatgcattgaagaaccagactgttgatcttgttcttactgctcatcctactcagtcggttcgtcgatctttgcttcaaaagcacggaagggtaaggaactgtttatctcaattgtatgctaaagacatcactcctgatgataagcaggagcttgatgaagctctccagagggagattcaagctgcattccgtactgacgaaatcaagaggactccaccaactccccaagatgaaatgagagctgggatgagttacttccatgaaacaatttggaagggtgtccctaaatttcttcgccgtgttgatacggcattgaagaacatagggattaacgaacgtgttccctataatgctcctcttattcaattttcttcttggatgggtggtgatcgtgacggtaatccaagagtgactcctgaagtgacaagggatgtttgcttactagctagaatgatggctgctaacttgtattattcacagatagaagatcttatgtttgaactttctatgtggcgttgcaatgacgagctacgtgttcgcgcagaagaacttcacaggaattccaagaaagatgaagttgcaaaacactatatagagttttggaaaaaaattcctttgaatgaaccataccgtgttgtactcggggaggtaagggacaagctctatcgcactcgtgagcgttctcgttatctcctagctcatggctactgtgaaattcctgaagaagccacattcaccaatgtcgatgagtttctggaacctcttgaactctgctacagatcactctgtgcttgtggtgatcgtgcaattgctgatggaagccttcttgatttcttgaggcaagtttccacttttggactgtcacttgtaaggcttgatatacggcaagagtctgatcgtcacactgacgtgatggatgccattaccaaacatttggaaattggatcctaccaagaatggtctgaagaaaaaagacaggaatggcttttgtccgagttgattggcaaaaggccactctttggacctgacctaccccaaaccgatgaaattagagatgttttagacacgttccgtgtcatagcagaacttccatctgacaactttggagcctacatcatttcgatggcaactgcaccgtctgatgtgctggcagttgagcttcttcaacgtgaatgcaaagtcaggaatccattaagagtcgttccgttgtttgaaaagcttgatgatcttgagtctgctcctgctgcattggctcggttgttctccatagactggtacattaaccggatcgatgggaagcaagaagttatgattggatattctgattcaggaaaagatgctggaaggttttctgcagcatggcagctatataaggctcaggaggacctcatcaaagtcgcacagaaatttggtgttaagctaaccatgttccacggtcgtggtggaactgttggaagaggaggtggacctacccatcttgctatcttgtctcaaccaccagaaacaattcacggatctcttcgtgtgacagttcaaggtgaagttattgaacagtcgttcggtgaggaacacttgtgctttaggacactgcaacgtttcactgctgctactctagaacatggaatgcgtcccccaagctctccaaaaccagaatggcgcgccttgatggatcagatggctgtcattgcaactgaggaataccgttcaattgtgttcaaggaaccacgttttgttgagtatttccgtctggctacaccagagatggagtatggtaggatgaacattggaagtcgaccggcaaagagaaggcctagtggaggcattgaaacactgcgtgcgataccatggatctttgcctggacacagacaaggtttcatcttccagtatggctgggctttggagcagcatttagacaagttgttcagaaggatgttaagaatctccatatgctgcaagagatgtacaatcaatggcctttctttagggttacaattgatttagttgaaatggtgtttgccaagggtgaccctggtattgcagcactgaatgataggctcctagtttcaaaggatctgtggccatttggggaacaattgagaagcaaatatgaagaaactaagaaactcctacttcaggtggctgcacacaaggaagttcttgaaggtgacccctacttgaagcaaagactcagactccgtgattcgtacattacaacccttaatgttttccaagcctacacattgaaacggatccgcgatccaaactacaaggtggaggtgcgccccccaatatcgaaagagtctgctgaaacaagtaaaccagctgatgaacttgtaacattgaatccaacaagtgaatatgctcctggtttggaagacacactcattcttaccatgaagggtattgctgctggcatgcagaacactggttaaattttggttacatttttcacttgtatttgtttctttatgttaagtgtgtactaagatttcataaatactagatgaatctagttgcaaacaagcacttcaagtgagtgcttttttctttttctttttcttttcataagaatttcacatcaggttttgttggtgtgcttccttactttgctgccacacaaatgagttatgcaattgatgttatgtttcaaggcataaattttgttgagtgctgctactatacgctttcttgttcaatttaatatgagactgaaaaacatagaaaataggaacaattataataa

SEQ ID NO: 48 - protein, 966 aa, Medicago sativa
MANKMEKMASIDAQLRQLVPAKVSEDDKLIEYDALLLDRFLDILQDLHGEDLKDSVQEVYELSAEYERKHDPKKLEELGNLITSFDAGDSIVVAKSFSHMLNLANLAEEVQIAHRRRNKLKKGDFRDESNATTESDIEETLKKLVFDMKKSPQEVFDALKNQTVDLVLTAHPTQSVRRSLLQKHGRVRNCLSQLYAKDITPDDKQELDEALQREIQAAFRTDEIKRTPPTPQDEMRAGMSYFHETIWKGVPKFLRRVDTALKNIGINERVPYNAPLIQFSSWMGGDRDGNPRVTPEVTRDVCLLARMMAANLYYSQIEDLMFELSMWRCNDELRVRAEELHRNSKKDEVAKHYIEFWKKIPLNEPYRVVLGEVRDKLYRTRERSRYLLAHGYCEIPEEATFTNVDEFLEPLELCYRSLCACGDRAIADGSLLDFLRQVSTFGLSLVRLDIRQESDRHTDVMDAITKHLEIGSYQEWSEEKRQEWLLSELIGKRPLFGPDLPQTDEIRDVLDTFRVIAELPSDNFGAYIISMATAPSDVLAVELLQRECKVRNPLRVVPLFEKLDDLESAPAALARLFSIDWYINRIDGKQEVMIGYSDSGKDAGRFSAAWQLYKAQEDLIKVAQKFGVKLTMFHGRGGTVGRGGGPTHLAILSQPPETIHGSLRVTVQGEVIEQSFGEEHLCFRTLQRFTAATLEHGMRPPSSPKPEWRALMDQMAVIATEEYRSIVFKEPRFVEYFRLATPEMEYGRMNIGSRPAKRRPSGGIETLRAIPWIFAWTQTRFHLPVWLGFGAAFRQVVQKDVKNLHMLQEMYNQWPFFRVTIDLVEMVFAKGDPGIAALNDRLLVSKDLWPFGEQLRSKYEETKKLLLQVAAHKEVLEGDPYLKQRLRLRDSYITTLNVFQAYTLKRIRDPNYKVEVRPPISKESAETSKPADELVTLNPTSEYAPGLEDTLILTMKGIAAGMQNTG

SEQ ID NO: 49 - DNA, 3213 bp, Zea mays
gccctctcctggctcctctccttcctgcttggtttttgctttcagctcttgaaccgaatccactgccgcggcgcttagcattggggactagggggccgacatggctgccttagggccgaagatggagcgtctgtcgtcgatcgacgcgcagctgcggatgctggtgccggggaaggtttcggaggacgataagctcatcgagtacgacgctctcctcctcgatcggttcctcgacatccttcaggacctccatggcgacgacctcaaggaaatggttcaagaatgctatgaggtagctgctgagtatgaaacaaaacatgacttgcaaaagcttgatgaactcgggaagatgataacaagcttggatcctggggactctatcgtgattgctaagtctctctcgcacatgcttaacttggccaacttggctgaggaagtccagatagcctacaggaggagaatcaagctcaagaagggagactttgctgatgagaactcggcaatcacagaatctgacattgaggaaacacttaagaggcttgttgttgacctgaagaagtcacctgctgaggtatttgatgccctcaagagccagactgttgatctggttttgactgcacatccaacacagtctgtgaggaggtcactgctccagaaacactcgaggatacgcaactgtttggttcaactctactcaaaagatatcactccggatgataagcaggaacttgatgaggctctgcaaagagagatccaagctgcctttagaactgatgagatccgaagaacacagcccactccccaagatgaaatgcgtgctggtatgagctacttccacgaaacaatttggaagggtgttccaaagttcttgcgccgggttgatactgcattgaagaacattgggattaacgagcgtgttccttacaatgcacctcttattcaattctcttcttggatggggggagatcgtgatggaaatccaagagtgacaccagaggttaccagggatgtctgcttgcttgccagaatgatggcatcaaacttgtactgctctcagattgaggatctcatgtttgagttgtctatgtggcgatgcagtgatgaactgcgcatgcgagctgatgtgctgcatctctccactaagaaggatgccaaacattacatagagttttggaagaaggttcctccaaatgagccatatcgggtgatactgagtgatgtcagggataaactgtacaacactcgtgaacggtcacgagagcttttatccagtgggcattctgatattcctgaggaagctacattgacaaatgttgagcagctgttggagcccttggaactatgttacagatcactctgtgcttgtggtgactctgtaattgctgatggaacccttctggatttcttgcgtcaagtgtccacctttggactctcccttgtgaggcttgacattaggcaagagtcagataggcatactgatgtccttgatgccatcactacatacctggggataggatcttaccgtgaatggactgaagaacgccgccaagaatggttactgtctgaacttaatggcaagcgccctctgtttggctcagaccttcccaagactgaggaaatttctgatgttctagacacattccatgttattgctgagcttccctctgacaattttggtgcgtatatcatttccatggcgacagctccgtcggacgtccttgctgttgaactcctccaacgtgagtgtcatgtgaaaacaccacttagagtagtcccgctgtttgagaagttggccgatcttgaggctgccccggctgcattggccagactgttctcaatagattggtacagacagaggatcaatggcaagcaggaggtcatgattgggtattcagactcgggcaaagatgctggtcgcctctcagcagcttggcagctatacaaagctcaggaggagctcatcaaggttgctaaggactttggtgtgaagttaacgatgttccatggacgtggtgggactgttggaaggggtggtggtcccactcaccttgccatcttgtcccagccaccagacacgatccacggatcactcagggtcactgtgcaaggtgaagtcattgaacagtcatttggtgaggagcacttgtgctttaggacactgcaacgtttcacggctgctaccctggagcatggcatgcacccaccaaatgcaccaaagccagaatggcgagcccttcttgatgagatggcagttgtggcaactgaggaatatcggtccattgtcttcaaagagccacgctttgtcgagtatttccgccttgcaacccctgaaacagagtatggtaggatgaacataggaagcaggccatccaagagaaagccgagcggaggtatcgactcactccgagcaatcccatggatctttgcttggacacaaacgcggttccacctcccggtctggctaggatttggagccgcattcaagaatgtcctccagaaggacatcaggaacctccacatgctccaggaaatgtacaatgagtggccatttttcagggtgactattgatctggtggagatggtgttcgccaagggtaatcctggcattgccgcactgtatgacaaactcctcgtttcagaggaactgcatccattgggtgagaagctgagggccaactatgaggaaacccagaagcttctacttcaggttgctgggcacagggatcttctggaaggtgacctctacctgaagcagcggctccgcctgcgtgatgcgtacatcaccaccctgaacgtctgccaggcctacaccctgaagcggatccgtgacccggactaccatgtcgcgctgcgcccccacctctccaaggagatcatggactcgaccaaggctgcggcggacgtggtgaagctgaaccctggcagcgaatacgcaccggggctggaggacaccctcatcctgaccatgaagggcatagcagccggcctccagaacaccggttaaaccacgaagaggggatcttttttctcctcctgatcattggctctaggtccttcgtattttcgcggattgtaacttcggccacctctctacaccgtgaggaaataatggtggtttctgcaaaagtggtggtaaataaaagggcgacaactatcttgtttttcatagtaacttataactttacgatgcgataatggaacatggcttgcgtt

SEQ ID NO: 50 - protein, 967 aa, Zea mays
MAALGPKMERLSSIDAQLRMLVPGKVSEDDKLIEYDALLLDRFLDILQDLHGDDLKEMVQECYEVAAEYETKHDLQKLDELGKMITSLDPGDSIVIAKSLSHMLNLANLAEEVQIAYRRRIKLKKGDFADENSAITESDIEETLKRLVVDLKKSPAEVFDALKSQTVDLVLTAHPTQSVRRSLLQKHSRIRNCLVQLYSKDITPDDKQELDEALQREIQAAFRTDEIRRTQPTPQDEMRAGMSYFHETIWKGVPKFLRRVDTALKNIGINERVPYNAPLIQFSSWMGGDRDGNPRVTPEVTRDVCLLARMMASNLYCSQIEDLMFELSMWRCSDELRMRADVLHLSTKKDAKHYIEFWKKVPPNEPYRVILSDVRDKLYNTRERSRELLSSGHSDIPEEATLTNVEQLLEPLELCYRSLCACGDSVIADGTLLDFLRQVSTFGLSLVRLDIRQESDRHTDVLDAITTYLGIGSYREWTEERRQEWLLSELNGKRPLFGSDLPKTEEISDVLDTFHVIAELPSDNFGAYIISMATAPSDVLAVELLQRECHVKTPLRVVPLFEKLADLEAAPAALARLFSIDWYRQRINGKQEVMIGYSDSGKDAGRLSAAWQLYKAQEELIKVAKDFGVKLTMFHGRGGTVGRGGGPTHLAILSQPPDTIHGSLRVTVQGEVIEQSFGEEHLCFRTLQRFTAATLEHGMHPPNAPKPEWRALLDEMAVVATEEYRSIVFKEPRFVEYFRLATPETEYGRMNIGSRPSKRKPSGGIDSLRAIPWIFAWTQTRFHLPVWLGFGAAFKNVLQKDIRNLHMLQEMYNEWPFFRVTIDLVEMVFAKGNPGIAALYDKLLVSEELHPLGEKLRANYEETQKLLLQVAGHRDLLEGDLYLKQRLRLRDAYITTLNVCQAYTLKRIRDPDYHVALRPHLSKEIMDSTKAAADVVKLNPGSEYAPGLEDTLILTMKGIAAGLQNTG

SEQ ID NO: 51 - DNA, 5845 bp, Triticum aestivum
gcggcgcgagcactaatcgactcactatagggcgtcgactcgatcttgagggctgaggacggtggaatcaggaccgtccacgtggacatgtggatgctcccaccataatccgtaaactaatcccagtcccgatcgaaatcaaatcacgaacactaccacttggacacaaattaatttgatttacagagatctctcgagtcccggtgaatcccggcggcactcctgccatccgccttctataaataggcagcaactggagtcacgacctcctcagtcccggccccaaccacatcctccccccaatctagctccctccctccctaccacgctggtccctgcgaggcggcgcggcgagcgcgagcagtcgggtcggctccggtcaaagcgagccggcgatggcgttgtcggcgccgggcggcggcagcgggaagatcgagcggctgtcgtcgatcgacgcgcagctgcggctgctcgtccccgccaaggtgtccgaggacgacaagctcattgagtacgacgcgctcctcctcgaccgcttcctcgacgtcctgcagggcctccacggcgacgatctcagggagatggtaactcttttttcttcttgttttctctctctcgcactgttcgatctcgcaccggatccgagctgtcccatcacccatgtgctactgctgcgctgctcccattgattcctctgaactttacatgtggcgcttcagggttcgagtggagttttcagctcagtgtttacggagtggggttgactttgggttaagtctcgatgtcggtagatttgtgtgtaatctggtgttgttaagtggtagtttggacgattgcccagctgctcagtttttctgccacaaacaaattttttttcgcagctaatctatatcccattgtggtcttgattttgggagcactgctttaattagtcgaactgggttactgattgaatctcaaatcgtgtcggtcaagcatgacttcatccgtggaatttgcctcgctctatcattgttgtgtcaactgattttggcatataagtgctggatcttatgttggtcatatacgggatactaaataactggcttagtagttgtgtcaactgaagtaatatgttaactgacttggatctactgtaattatgaaaaatagctaacagtgttcatctcttagtctacgaatatactagttgggttaaactgtcgatacaacggatagacgccttcttaggctaaccggcatggaagtgctgataatatttacatgtatggaagtctcgagacattgtccattgcttgtagaagaccgttacatcttgtttataccttacctaacaaagcctgagatatggcgtttccagagaaccaaactaggggaaaaaaggttcttgaaatcgacttgccttgacttttgttgacttggtggctcacaacctgtttggtaccttgcttgtcaattgattaagaagacgtaggcatataaacaatcaggttgctggtcggcttgattatctttttggtaccttgcttgtcagttgattaagaagacatcctatatcttatgttgattgatggacagccataattggattattattttcactaaacaggttcaagaatgctatgaggtggctgctgaatatgaaactaagcatgacctggaaaagcttgatgaactcggagagatgataacaagcttggatcctggtgactctattgtgattgccaaagctttttcacacatgcttaacttggccaacttggctgaggaagtgcagatcgcatacaggaggagagtcaagctcaagaagggagactttgctgatgaaaattcagcaatcacagaatctgacatcgaggaaactcttaagaggcttgtttttgacatgaagaagtcccctgctgaggtttttgatgccctcaagaatcagactgttgatctggttttgactgcacatccaacacaatctgtaaggaggtcactgctccagaagcattcgaggttagttaaccaaacattgtgatgatagtagtcatgatacaatttctatatattaatcctgattacaatgactttatatcaggatccggaactgtttggttcagttatactcgaaggatatcactccagatgacaagcaggaacttgacgaggctctccagagagaggtgcttactgctatccttatgttgattttcatgctgtttctaaggcacattgttaacatgacaatgcagtcacagtagccttacaacatcagacagctgagattctttcttacacttaacctagaatcctcctttttagatccaagctgcctttagaactgatgagatccgaagactcagcccgactccccaagatcacatgcgtgctggtatgagcgactttcatgagacaatatggaagggtgttccaaagtttttgcgccgtgttgatacggcattgaagaacattgggatcaatgagcgtgttccttataatgctcctcttatccaattctcttcttggatgggtggagatcgtgatggtgagtggaatctctgtccctcgtgatactgtgcagcgtacatctatgatgtatctacagtcactgcaagcttttattaccttggtggtgtctgttagatgctacattttctgtatctggtcgtatcaagaactatggataaagccaactgttttatgtatctaaacttctagtacctttacaaatacaggaaatccaagagtgacaccagaagttacaagggacgtctgtttgcttgccagaatgatggcagctaatttgtattgtgcacagattgaggatctcatgtttgaggtagaaattgattgattacttttaactaagttcacatatatttgatcattagaagttggataaaacttcaaactatttcagttgtctatgtggcgatgcaatgatgagctacgctcgcgagctgatgagctgcaccgctcttctaagaaggatgctaagcattacataggtacataacagtaacagtttttttaaatgtaaaatagtaggtcagacccctgccagagctttaaaaaggcagtaacagcttctaggcatgaaatttcacataacatatgccttttttttgttctacttattaatttgtgatgttcatctccgatatatagagttctggaagaaggttcctccgaatgagccatatcgggtaatactgggtgatgttagggataatctttacaacacgcgtgagcgatcacgtgagttgttatccagtggacattccgacatacctgaggaagctactctgacaaatcttgagcaggttgagtaatgtctacgaaatataattggaactatacattttttcttcaatggtactatgtttggtagagaaatggtctttaatatatgtcggtcttctcttgcagctgttggagcccttggagctctgttacaggtcactgtgtgcttgtggtgaccgtgttattgctgatggaacccttcttgatttcttgcgccaagtctctacctttggactttccctcgtgaagcttgacatcaggcaagagtctgacaggcacactgatgctctggatgcaatcacctcatacctgggaataggatcttatcgtgagtggtctgaggaacaccgtcaagaatggctgttgtctgaactcaatgggaagcgcccattatttggcgcagaccttcccatgacagaggaagttgctgatgttatgggcgcgttccaggttattgctgagctgcccggtgacaattttggagcatatgtcatctcaatggcaacatctccttcagatgttcttgctgtggagctcctccaacgtgagtgccatatcaagacaccacttagagttgtccccctgtttgagaagttggccgatctcgaggctgccccagcagcactggccagactcttctcaatagattggtacagagagaggatcaatggcaagcaggaggtcatgattgggtattcagactcaggcaaggatgcaggccgtctctcagcagcttggcagatgtacaaggctcaggaggacctcgtcaaggtcgctaagcaatttggagtgaaattgacgatgttccatggacgaggtgggactgttggaaggggtggtggccccactcatcttgctatcttgtctcagccaccggacacgatcaatggatcactccgggtcactgttcagggtgaagttatcgagcagagctttggggaagaacacttgtgcttcaggacgctccagcgtttcacagctgctactcttgagcatgggatgcgtccacccatttcaccaaagccagagtggcgagctcttctcgatgagatggctgtggtggcaactgaagaatatcggtcaattgtcttccaagaaccacgcttcgtcgagtatttccgccttgtaagtccttgctctcattgaccatcaggctaggaaacatattaactgcttgaatagacttttcaatatgttgcaaacctgaacctgccagtgagatggaattcatgcaatgatttacggtggaaacctatatcatgaaaataatttcaaaaaataatgaattgtgatagcacttagggtaccttcttttgcaactgtaatttctatgacagtacaaaccctcgccaatgttatattggcagctcaggttattgcagtaaggtttaaacaaaacaaaaacaaaccttggtgccattcaggttgaaccttcagtcaaataatttctttctgatatttgtgtttgacaggcaacaccggagacagagtatggcaggatgaatatagggagcaggccatccaagagaaagccaagtggtggcattgaatcactccgtgcaatcccatggatcttcgcatggacgcagacacggttccacctcccggtctggctgggctttggtggtgccttcaagcatatcctcaagaaggacatcaggaacttccacatgctccaggagatgtacaacgagtggccattcttcagggtcaccatcgatcttgttgagatggtgttcgccaagggtaatcctggcattgctgccttgtatgacaggctcctagtttcagaggggctacagcccctgggtgagaagctgagggccaactatgaggagacccagaagctgcttcttcaggtttttgttactaaaacgcagaactcctgtacttcgttcaacaacactgccagcattgatcttctaggccagttgttaaaatattgacaataaaactggattttcttgatttcaggttgctgggcacaaggatcttcttgaaggtgatccctacctgaagcagcggctccgcctccgtgacgcgtacatcaccaccatgaacgtctgccaggcatacacattgaagaggatccgtgacccagactaccatgttgcgctgcgcccccatctgtccaaggaggtgatggacacgagcaagccggctgctgagctcgtgacgctgaacccggcgagtgagtacgcgccggggctggaggataccctcatcttgaccatgaagggcattgctgccggtctccagaacaccggttagggcaaggggagattgccggattatcttttttttgtaccttgatgagatattttccttttatcgagtgctgtgggccttgtatctcagcggatgttgctgcatctgcccctatatccagtgaggaataatggcatttcgcaagtagtataatatttataaataaaggcaaacaatgataatttctaatctgtttgtcagtcgtacttggaacacttaaggacatgtaccatggtgctatcttaggagtgccatattggataaatgatgtggtggagaaaagagaatt

SEQ ID NO: 52 - protein, 972 aa, Triticum aestivum
MALSAPGGGSGKIERLSSIDAQLRLLVPAKVSEDDKLIEYDALLLDRFLDVLQGLHGDDLREMVQECYEVAAEYETKHDLEKLDELGEMITSLDPGDSIVIAKAFSHMLNLANLAEEVQIAYRRRVKLKKGDFADENSAITESDIEETLKRLVFDMKKSPAEVFDALKNQTVDLVLTAHPTQSVRRSLLQKHSRIRNCLVQLYSKDITPDDKQELDEALQREIQAAFRTDEIRRLSPTPQDHMRAGMSDFHETIWKGVPKFLRRVDTALKNIGINERVPYNAPLIQFSSWMGGDRDGNPRVTPEVTRDVCLLARMMAANLYCAQIEDLMFELSMWRCNDELRSRADELHRSSKKDAKHYIEFWKKVPPNEPYRVILGDVRDNLYNTRERSRELLSSGHSDIPEEATLTNLEQLLEPLELCYRSLCACGDRVIADGTLLDFLRQVSTFGLSLVKLDIRQESDRHTDALDAITSYLGIGSYREWSEEHRQEWLLSELNGKRPLFGADLPMTEEVADVMGAFQVIAELPGDNFGAYVISMATSPSDVLAVELLQRECHIKTPLRVVPLFEKLADLEAAPAALARLFSIDWYRERINGKQEVMIGYSDSGKDAGRLSAAWQMYKAQEDLVKVAKQFGVKLTMFHGRGGTVGRGGGPTHLAILSQPPDTINGSLRVTVQGEVIEQSFGEEHLCFRTLQRFTAATLEHGMRPPISPKPEWRALLDEMAVVATEEYRSIVFQEPRFVEYFRLATPETEYGRMNIGSRPSKRKPSGGIESLRAIPWIFAWTQTRFHLPVWLGFGGAFKHILKKDIRNFHMLQEMYNEWPFFRVTIDLVEMVFAKGNPGIAALYDRLLVSEGLQPLGEKLRANYEETQKLLLQVAGHKDLLEGDPYLKQRLRLRDAYITTMNVCQAYTLKRIRDPDYHVALRPHLSKEVMDTSKPAAELVTLNPASEYAPGLEDTLILTMKGIAAGLQNTG

SEQ ID NO: 53 - DNA, 3535 bp, Oryza sativa
aggtggaagagacggacagaggccactacccgtgcaccacgccccctctcccacaatctcgcaaaaaagttgattttctttttcagcttcctcctcccctcctccgcttctcatcaatccactagcatatcagatcagattcctgtacacttccctttcctcgcatccaatcccgactatcaaatcatcaccatccttttgcaaaaccaaaaaaaaaaaagtagataaaagaagaaggttcttgcatccaagagaggaggacactgtccgtcgtgcagcgtttcttgcttggttgaatcgggtggttttgggggggatggcggggaaggtggagaagatggcgtcgatcgacgcgcagctgcggatgctggcgccggcgaagctgtcggaggacgacaagctggtggagtacgacgccctcctcctcgaccgcttcctcgacatcctccaggacctccacggcgacgacctccgcgagctggtccaagaatgctatgagatcgctgctgagtatgaagggaagcatgactcccaaaagctcgatgaacttggcaacatgttgacaagcttggatcctggtgactccattgtgatggccaaagctttctcccacatgcttaatttggctaacttggccgaggaggtccagattgcatacaggaggagaatcaagctcaagaagggtgactttgctgatgagaactcggcactgacagaatctgacattgaagaaacttttaagaggcttgttgttgacctgaagaaatcaccagcagaggtctttgatgcccttaagagtcagactgttgacctggttttgactgcacatccaacacagtcagtgaggaggtcactgcttcaaaaacactcaaggataaggaattgtttggttcaactatactcaaaggatatcacaccagatgataaacaggagcttgatgaggctctccagagggagattcaagcagcctttagaactgatgagatccgaagaacccagccaactcctcaagatgaaatgagggctggtatgagttactttcatgagacaatctggaaaggtgttccgaagttcttacgccgtctggacactgccttgaagaacatcggaattgatgagcgtgttccttataatgcacctctcattcagttctcttcttggatgggaggagaccgtgatggaaatccaagagtgacaccagaagtcacaagggatgtatgcttgcttgctagaatgatggcttcaaatttatactgctcgcaaattgaggatctcatgtttgagctgtctatgtggcgatgcaatgatgagcttcgggcacgagcagatgagctgcatctctcctcaaagaaagatgcaaagcactatatagaattctggaagaaggttccgcccagtgagccataccgagttgttctaggtgatgtgagagacaagctgtacaacacacgtgaacgagcacgccagttattatccagcggatattctgacattcctgaagaaaccactctcaccagtgttgaacagttcttagagcctctggagctatgttacaggtcactctgcgattgcggtgaccgtgtaattgctgatgggacccttctggacttcttgcgccaggtgtctacctttgggctgtgccttgtgaggcttgacattaggcaagaatctgacaggcacaccgatgtcctcgatgccatcaccacatacctgggaataggatcataccgtgagtggtccgaggaacgccgtcaggactggctcttgtctgaactcaatgggaagcgcccattgtttggcccagaccttcccaagaccgatgagattgctgacgttctagacacgttccgcgtgatagctgagcttcccgctgacaattttggggcctatatcatttccatggcgacagctccgtcagacgtgcttgctgttgagctcctccaacgtgaatgccatgtgaagacaccacttagagttgtcccactgtttgagaagttggctgatcttgaatctgccccagcagcagtggccagactgttctccatagattggtacagagaaaggataaatggcaaacaggaggtcatgattggctattcggactcgggtaaggacgccggtcgtctctcggcagcttggcagctgtacaagtctcaggaggagctcatcaacgttgccaaggagtttggggtgaagttgacaatgttccatgggcgcggtgggactgtcggaagaggcggaggtcccactcatcttgccatcttgtctcagccaccagacacaatccatggatctctccgggtcactgtccagggtgaagtcattgagcagtcctttggtgaggagcacctttgcttcaggacactgcagcgtttcacggctgccactctggagcatggcatgcatccaccaattgcgccgaaaccagaatggcgtgctctgcttgatgagatggctgtggtggctacaaaggaataccggtccatcgtcttccaggaaccacgctttgtcgagtatttccgccttgcaacaccagagatggagtatggaaggatgaatataggaagcaggccatccaagagaaagccgagtggtggcatcgagtcactccgtgccatcccatggatcttcgcgtggacgcaaactcgcttccaccttcctgtctggcttggcttcggttctgccttcaagcacatcctggagaaggacatcaggaacctccacatgctccaggagatgtacaatgagtggccgttcttcagagtcacgatcgatctggttgagatggttttcgccaagggtgaccctggcatcgccgcattgtacgacaagctccttgtctccgaggagctatggcctctgggagagaaactgagggccaactgtgaagaaaccaaacagcttctccttcaggttgctggacacaaggatcttctcgaaggtgatctctacctgaagcagcgccttcgcctccgcaatgcctacatcaccaccctgaatgtctgccaggcttacacgatgaagcgaatccgcgacccggactaccatgtcacgctgcgcccccacatgtccaaggagatcatggactggtctaagccggctgcggagctggtgaagctgaacccgaccagtgagtatgcgccggggctggaggacaccctcatcctgaccatgaagggaattgctgctggaatgcagaacaccggctaagcgaactatcaactatgaagtgcctgaattcacaccgttttatatggactcttatcttgatttcggtcatttgctctcggccatttaattttgccgatgcagaggctcgtgcagtttctaatttctttcggaagatattttcaataatggagttgtacaagaacatcaattaatcaaaataaagtggatattatgttcattatcgtttagagcaacctggtaaagccatttttttgtgtagaccacatagtgagtgtgttgaaattccatttgcttaatgaaactgccattatctaagtaaagtcaaagggctcctttatattg

SEQ ID NO: 54 - protein, 964 aa, Oryza sativa
MAGKVEKMASIDAQLRMLAPAKLSEDDKLVEYDALLLDRFLDILQDLHGDDLRELVQECYEIAAEYEGKHDSQKLDELGNMLTSLDPGDSIVMAKAFSHMLNLANLAEEVQIAYRRRIKLKKGDFADENSALTESDIEETFKRLVVDLKKSPAEVFDALKSQTVDLVLTAHPTQSVRRSLLQKHSRIRNCLVQLYSKDITPDDKQELDEALQREIQAAFRTDEIRRTQPTPQDEMRAGMSYFHETIWKGVPKFLRRLDTALKNIGIDERVPYNAPLIQFSSWMGGDRDGNPRVTPEVTRDVCLLARMMASNLYCSQIEDLMFELSMWRCNDELRARADELHLSSKKDAKHYIEFWKKVPPSEPYRVVLGDVRDKLYNTRERARQLLSSGYSDIPEETTLTSVEQFLEPLELCYRSLCDCGDRVIADGTLLDFLRQVSTFGLCLVRLDIRQESDRHTDVLDAITTYLGIGSYREWSEERRQDWLLSELNGKRPLFGPDLPKTDEIADVLDTFRVIAELPADNFGAYIISMATAPSDVLAVELLQRECHVKTPLRVVPLFEKLADLESAPAAVARLFSIDWYRERINGKQEVMIGYSDSGKDAGRLSAAWQLYKSQEELINVAKEFGVKLTMFHGRGGTVGRGGGPTHLAILSQPPDTIHGSLRVTVQGEVIEQSFGEEHLCFRTLQRFTAATLEHGMHPPIAPKPEWRALLDEMAVVATKEYRSIVFQEPRFVEYFRLATPEMEYGRMNIGSRPSKRKPSGGIESLRAIPWIFAWTQTRFHLPVWLGFGSAFKHILEKDIRNLHMLQEMYNEWPFFRVTIDLVEMVFAKGDPGIAALYDKLLVSEELWPLGEKLRANCEETKQLLLQVAGHKDLLEGDLYLKQRLRLRNAYITTLNVCQAYTMKRIRDPDYHVTLRPHMSKEIMDWSKPAAELVKLNPTSEYAPGLEDTLILTMKGIAAGMQNTG

SEQ ID NO: 55 - DNA, 2928 bp, Oryza sativa
atgtcggcgatgtcggcggcgggcggcggcggcggcgtggggaaggtggagcggctgtcgtcgatcgacgcgcagctgcggcagctggtgccggcgaagctgtcggaggacgacaagctcatcgagtacgacgcgctcctcctcgaccgattcctcgacgtcctccatggcctccacggcgacgacctcaaggatctcgttcaagaatgctatgaggtggccgcggagtatgaaacaaagcacgacgtgcaaaagctcgatgaactcggcaacatgataacaagcttggatccgggcgactcgattgttattgcgaaagccttttcgcacatgcttaacttggccaacttggctgaagaagtccagatcgcatacaggaggaggatcaagctcaagaagggtgatttcgctgacgaaaactcggcaatgactgaatccgacattgaggaaacactcaagaggcttgtttttgacctgaagaaatcccctgctgaggtctttgatgccctcaagagtcagactgttgaccttgttttgactgcacatccaacacagtctgtgaggaggtcactgctccagaaacactccaggattcggaactgtctggttcagctttattcaaaggatatcactccagatgacaagcaagagcttgatgaggctctccagagagagatccaagctgcctttagaaccgatgagatccgaagaacacagcccactccccaagatgaaatgcgtgctggcatgagctacttccatgaaacaatatggaagggtgttccaaagttcttgcgccgtgtggatactgcattgaagaacatcggtatcgacgagcgtgttccttacaatgctcctcttattcagttctcgtcttggatgggaggagatcgtgatggaaatccaagagtcacaccagaggttacaagggatgtctgcttgcttgcaagaatgatggcagcaaacttgtattgctcacaaattgaggatctcatgtttgagttatctatgtggcgatgtaacgaggagctacgctcacgagctgatgatctgcaccgctcttctaagaaggacgcaaagcattacatagagttttggaagaaggttcctctgaatgaaccataccgggtgatactgagtgatgtgagagataagctttacaatacacgtgaacgatcacgggagttgttgtccagcggatattgcgacatccctgaggaagcaactctgacaaatgttgagcagctattggagcccttggagctatgctacaggtcgctgtgcgcctgtggtgaccgtgccatcgctgatggaagccttcttgatttcttgcgccaagtttccacctttggactctcccttgtgaggcttgacattaggcaagaatccgacagacacaccgatgtccttgatgccatcacgacatacctgggcataggatcttaccgtgagtggtccgaggaacgccgtcaagagtggctgttgtccgaactcaacgggaagcgaccattgtttggcccagaccttcccaggacagatgaggttgctgatgttctagacacattccatgtgattgccgagctccctgctgacagttttggagcctatgttatttccatggcaacagccccctcggatgtccttgctgttgagctcctccaacgcgagtgccatgtcaagacaccgcttagagttgtccccctgttcgagaagttggctgatcttgagtctgcccctgcggcattgaccaggctcttctcaataagttggtacaggcagaggatcaatggtaagcaggaggtcatgattgggtattcagattcaggcaaggatgctggccgtctctcggcagcttggcagatgtacaaggctcaggagcagctcgtcaaggtagcgaaggatttcggggtcaagttgacgatgttccatggacgaggtggaaccgttggtaggggcggtgggccgactcaccttgccatcttgtctcagcctccagacacgatcaacggatcgctccgtgtcactgttcagggtgaagtcattgagcagagctttggtgaggagcacttgtgtttcaggacactgcagcgtttcaccgctgctacacttgagcacggcatgcatccacccagtgcaccgaagccagaatggcgagctcttcttgatgagatggctgtggtggcaaccaaggagtatcgatccgtagtgttccaagagccacgctttgtggagtatttccgccttgcaacacctgagacagagtatggaaggatgaacataggaagcaggccatccaagaggaagccgagtggaggcattgaatcactccgtgcgatcccatggatcttcgcatggacgcagacccgcttccaccttcccgtctggcttggattcggtgctgcattcaagcacgcccttcagaaggacatcaggaatctccacatgctccaggagatgtacaacgagtggccgttcttcagggtcactctcgacctgattgagatggttttcgccaagggtaatcctggcattgctgccctttacgacaaactcctcgtttctgaggatctacagccactgggtgagaagctgagagccaactatgtagagacacaaaagctgcttcttcaggttgctggccatagggatcttcttgaaggtgacccctacctgaagcagcggctccgactccgcgacgcctacataaccaccctgaatgtctgccaagcctacacgctgaaacggatccgcgacccggattaccacgtcacgctgcgccctcacctgtccaaggaggtgatggatgggagcaagccggccgcggagcttgtgaagctgaacccgggtagcgagtacgcgccagggctggaggacaccctcatcctgaccatgaagggcattgctgcagggttgcagaacactggttaa

SEQ ID NO: 56 - protein, 975 aa, Oryza sativa
MSAMSAAGGGGGVGKVERLSSIDAQLRQLVPAKLSEDDKLIEYDALLLDRFLDVLHGLHGDDLKDLVQECYEVAAEYETKHDVQKLDELGNMITSLDPGDSIVIAKAFSHMLNLANLAEEVQIAYRRRIKLKKGDFADENSAMTESDIEETLKRLVFDLKKSPAEVFDALKSQTVDLVLTAHPTQSVRRSLLQKHSRIRNCLVQLYSKDITPDDKQELDEALQREIQAAFRTDEIRRTQPTPQDEMRAGMSYFHETIWKGVPKFLRRVDTALKNIGIDERVPYNAPLIQFSSWMGGDRDGNPRVTPEVTRDVCLLARMMAANLYCSQIEDLMFELSMWRCNEELRSRADDLHRSSKKDAKHYIEFWKKVPLNEPYRVILSDVRDKLYNTRERSRELLSSGYCDIPEEATLTNVEQLLEPLELCYRSLCACGDRAIADGSLLDFLRQVSTFGLSLVRLDIRQESDRHTDVLDAITTYLGIGSYREWSEERRQEWLLSELNGKRPLFGPDLPRTDEVADVLDTFHVIAELPADSFGAYVISMATAPSDVLAVELLQRECHVKTPLRVVPLFEKLADLESAPAALTRLFSISWYRQRINGKQEVMIGYSDSGKDAGRLSAAWQMYKAQEQLVKVAKDFGVKLTMFHGRGGTVGRGGGPTHLAILSQPPDTINGSLRVTVQGEVIEQSFGEEHLCFRTLQRFTAATLEHGMHPPSAPKPEWRALLDEMAVVATKEYRSVVFQEPRFVEYFRLATPETEYGRMNIGSRPSKRKPSGGIESLRAIPWIFAWTQTRFHLPVWLGFGAAFKHALQKDIRNLHMLQEMYNEWPFFRVTLDLIEMVFAKGNPGIAALYDKLLVSEDLQPLGEKLRANYVETQKLLLQVAGHRDLLEGDPYLKQRLRLRDAYITTLNVCQAYTLKRIRDPDYHVTLRPHLSKEVMDGSKPAAELVKLNPGSEYAPGLEDTLILTMKGIAAGLQNTG

SEQ ID NO: 57 - DNA, 3307 bp, Oryza sativa
cccacactctctacccccaaacttgccctccaatctatctccgccgccgccgccgcctccgccgcgagagggcgtcgccgagctgcgcgggaggctcgcctcccgcagcatctggccggattcgtcgtagtcgaggcagctgtaagcgagagagagggagatggccgcggccgccgggaaggcggcgatggagcggcaccagtcgatcgacgcgcagctgcggctgctcgcgccggggaaggtatccgaggacgacaagctcgtcgagtacgacgccctcctcgtcgaccgcttcctcgacatcctccaggacctgcacggccctcacctccgcgaattcgtgcaggagtgctacgagctgtcggcggagtacgagaacgacagggacgaggcgcggctcgacgagctggggaggaagctcaccagcctgccgccgggggactccatcgtcgtctccagctccttctcgcacatgctcaacctcgccaacctcgccgaggaggtgcagatcgcgcaccgccgccggatcaagctcaagcgcggggacttcgccgacgaggcctccgcgcccaccgagtccgacatcgaggagacgctcaagcgcctcgtcacccagctcggcaagtcgagggaggaggtgttcgatgcgctcaagaaccagaccgttgacctcgtgttcaccgcgcatccaacgcagtccgtcaggaggtccctgctccagaagcacgggaggatccggaattgcctgaggcagttatatgcgaaagacatcactgctgatgacaagcaggagcttgatgaggccctgcagagggagattcaagcagctttcagaactgatgaaatccgcaggactcctcccactcctcaggatgaaatgcgcgccgggatgagttattttcatgaaactatatggaagggtgtaccaaagttcttgcgccgcattgatactgctctgaaaaatattgggattaatgagcgtcttccttacaatgctcctctcatccagttctcatcctggatgggtggtgaccgtgatggaaacccaagagttacaccagaggttacaagagatgtatgcttgttggcaagaatgatggctgctaacctgtacttctctcagatagaagatctgatgtttgagctctctatgtggcgctgcagtgatgaacttcgaattcgtgcagatgatttgcattgctcctccagaaaagctgcaaagcactatatagaattctggaagcaaattcctccaaatgagccttatcgtgtcatacttggtggtgtcagggataaattgtactatacgcgtgaacgtactcgccatctattgacaactggagtttctgaaattccagaggaggcaacgtttactaatgttgaagagtttctggagccgcttgagctgtgctacagatcattatgtgcttgtggtgacaaacctatagctgatggaagccttcttgatttcttgcgtcaagtatcaacttttgggctggctcttgtaaaacttgacataaggcaggagtctgatcgacacactgatgtccttgatgccataactacatatcttgggattggatcttacgctgaatggtctgaggagaaacgccaggattggcttttgtccgaactaaggggcaaacgtcctttgtttggtcctgatcttcctcagactgaagaaattgctgatgttttaggaacatttcacgtccttgctgagctcccggcagattgttttggtgcttacatcatctcaatggcaactgcaccatctgatgtgcttgctgtggagcttctacagcgggagtgccatataaaacagcctctgcgagttgttcccctatttgagaaacttgcagatcttgaagcagctccagcagcggtggcacgactattttcaatagactggtacatgaataggattaatggcaagcaggaggtcatgattggatactcagactctggcaaggatgctggtcgtctttctgcagcatggcaaatgtacaaagcacaagaggagcttgtcaaggtggcaaagcattatggtgtaaagttgacaatgttccatggaagaggtggaacagttggcagaggaggtggtcccagtcatcttgccatattatctcaaccaccagacacgatacatggatcacttcgtgtaacagtacagggcgaggttattgaacactcgtttggagaggaacacttgtgctttagaactctgcagcgctttactgcagctactcttgagcatggaatgcatcctccaatttcccccaaaccagaatggcgtgctctaatggatgagatggctgttgtggcaacaaaggaatatcgatcaatcgtcttcaaggagccacggtttgttgaatacttccgatcggcaacacctgagacagaatatggcaggatgaacattggtagccgaccatcaaagagaaagcctagtggtggcattgaatcgctccgtgcaattccttggatttttgcttggacacaaactaggtttcatcttcctgtatggcttggatttggtggagcgttcaaacatataatgcagaaggatatcaggaacatccatacactgaaagaaatgtacaatgagtggccattcttcagggtcaccttggacttgcttgagatggttttcgctaagggagatccaggaattgctgctttatatgacaaattgcttgtggcaggtgatctgcaatcctttggagagcagctgagaaacaactttgaagagacaaaacagctactccttcaggttgccggtcacaaggatattctggaaggggatccttacctgaagcagcgtctgcggctgcgtgagtcgtacatcactaccttgaacgtttgccaagcctacaccctgaagcggataagggaccctagcttcgaggtgatgtcgcagccggccttgtcgaaggagttcgtcgacagcaaccagcctgccgagctggtccaactgaacgctgcgagcgagtacgcacctggcctggaggacaccctcatcctgacgatgaagggcattgctgccggcatgcagaacacaggctagattgtccacaagaatgcttccagcaggtgcaatcaatcaatcatcaataactccttccatgatgagatggtgaatatgtttaactagtacgttcgccgatgctagtgaattctggagacttttttttgctcgcacgttttcttttggttgtgtacttgatgtaaatgtcaaggggggacttatttggcttttgcagcccgatccaaaataaaatatggaccaatcattctacgaaaaaaa

SEQ ID NO: 58 - protein, 959 aa, Oryza sativa
MERHQSIDAQLRLLAPGKVSEDDKLVEYDALLVDRFLDILQDLHGPHLREFVQECYELSAEYENDRDEARLDELGRKLTSLPPGDSIVVSSSFSHMLNLANLAEEVQIAHRRRIKLKRGDFADEASAPTESDIEETLKRLVTQLGKSREEVFDALKNQTVDLVFTAHPTQSVRRSLLQKHGRIRNCLRQLYAKDITADDKQELDEALQREIQAAFRTDEIRRTPPTPQDEMRAGMSYFHETIWKGVPKFLRRIDTALKNIGINERLPYNAPLIQFSSWMGGDRDGNPRVTPEVTRDVCLLARMMAANLYFSQIEDLMFELSMWRCSDELRIRADDLHCSSRKAAKHYIEFWKQIPPNEPYRVILGGVRDKLYYTRERTRHLLTTGVSEIPEEATFTNVEEFLEPLELCYRSLCACGDKPIADGSLLDFLRQVSTFGLALVKLDIRQESDRHTDVLDAITTYLGIGSYAEWSEEKRQDWLLSELRGKRPLFGPDLPQTEEIADVLGTFHVLAELPADCFGAYIISMATAPSDVLAVELLQRECHIKQPLRVVPLFEKLADLEAAPAAVARLFSIDWYMNRINGKQEVMIGYSDSGKDAGRLSAAWQMYKAQEELVKVAKHYGVKLTMFHGRGGTVGRGGGPSHLAILSQPPDTIHGSLRVTVQGEVIEHSFGEEHLCFRTLQRFTAATLEHGMHPPISPKPEWRALMDEMAVVATKEYRSIVFKEPRFVEYFRSATPETEYGRMNIGSRPSKRKPSGGIESLRAIPWIFAWTQTRFHLPVWLGFGGAFKHIMQKDIRNIHTLKEMYNEWPFFRVTLDLLEMVFAKGDPGIAALYDKLLVAGDLQSFGEQLRNNFEETKQLLLQVAGHKDILEGDPYLKQRLRLRESYITTLNVCQAYTLKRIRDPSFEVMSQPALSKEFVDSNQPAELVQLNAASEYAPGLEDTLILTMKGIAAGMQNTG

SEQ ID NO: 59 - DNA, 3808 bp, Oryza sativa
acccacacacccacactctctacccccaaacttgccctccaatctatctccgccgccgccgccgcctccgccgcgagagggcgtcgccgagctgcgcgggaggctcgcctcccgcagcatctggccggattcgtcgtagtcgaggcagctgtaagcgagagagagggagatggccgcggccgccgggaaggcggcgatggagcggcaccagtcgatcgacgcgcagctgcggctgctcgcgccggggaaggtatccgaggacgacaagctcgtcgagtacgacgccctcctcgtcgaccgcttcctcgacatcctccaggacctgcacggccctcacctccgcgaattcgtgcaggagtgctacgagctgtcggcggagtacgagaacgacagggacgaggcgcggctcgacgagctggggaggaagctcaccagcctgccgccgggggactccatcgtcgtctccagctccttctcgcacatgctcaacctcgccaacctcgccgaggaggtgcagatcgcgcaccgccgccggatcaagctcaagcgcggggacttcgccgacgaggcctccgcgcccaccgagtccgacatcgaggagacgctcaagcgcctcgtcacccagctcggcaagtcgagggaggaggtgttcgatgcgctcaagaaccagaccgttgacctcgtgttcaccgcgcatccaacgcagtccgtcaggaggtccctgctccagaagcacgggaggatccggaattgcctgaggcagttatatgcgaaagacatcactgctgatgacaagcaggagcttgatgaggccctgcagagggagattcaagcagctttcagaactgatgaaatccgcaggactcctcccactcctcaggatgaaatgcgcgccgggatgagttattttcatgaaactatatggaagggtgtaccaaagttcttgcgccgcattgatactgctctgaaaaatattgggattaatgagcgtcttccttacaatgctcctctcatccagttctcatcctggatgggtggtgaccgtgatggaaacccaagagttacaccagaggttacaagagatgtatgcttgttggcaagaatgatggctgctaacctgtacttctctcagatagaagatctgatgtttgagctctctatgtggcgctgcagtgatgaacttcgaattcgtgcagatgatttgcattgctcctccagaaaagctgcaaagcactatatagaattctggaagcaaattcctccaaatgagccttatcgtgtcatacttggtggtgtcagggataaattgtactatacgcgtgaacgtactcgccatctattgacaactggagtttctgaaattccagaggaggcaacgtttactaatgttgaagagtttctggagccgcttgagctgtgctacagatcattatgtgcttgtggtgacaaacctatagctgatggaagccttcttgatttcttgcgtcaagtatcaacttttgggctggctcttgtaaaacttgacataaggcaggagtctgatcgacacactgatgtccttgatgccataactacatatcttgggattggatcttacgctgaatggtctgaggagaaacgccaggattggcttttgtccgaactaaggggcaaacgtcctttgtttggtcctgatcttcctcagactgaagaaattgctgatgttttaggaacatttcacgtccttgctgagctcccggcagattgttttggtgcttacatcatctcaatggcaactgcaccatctgatgtgcttgctgtggagcttctacagcgggagtgccatataaaacagcctctgcgagttgttcccctatttgagaaacttgcagatcttgaagcagctccagcagcggtggcacgactattttcaatagactggtacatgaataggattaatggcaagcaggaggtcatgattggatactcagactctggcaaggatgctggtcgtctttctgcagcatggcaaatgtacaaagcacaagaggagcttgtcaaggtggcaaagcattatggtgtaaagttgacaatgttccatggaagaggtggaacagttggcagaggaggtggtcccagtcatcttgccatattatctcaaccaccagacacgatacatggatcacttcgtgtaacagtacagggcgaggttattgaacactcgtttggagaggaacacttgtgctttagaactctgcagcgctttactgcagctactcttgagcatggaatgcatcctccaatttcccccaaaccagaatggcgtgctctaatggatgagatggctgttgtggcaacaaaggaatatcgatcaatcgtcttcaaggagccacggtttgttgaatacttccgatcggcaacacctgagacagaatatggcaggatgaacattggtagccgaccatcaaagagaaagcctagtggtggcattgaatcgctccgtgcaattccttggatttttgcttggacacaaactaggtttcatcttcctgtatggcttggatttggtggagcgttcaaacatataatgcagaaggatatcaggaacatccatacactgaaagaaatgtacaatgagtggccattcttcagggtcaccttggacttgcttgagatggttttcgccaagggagatccaggaattgctgctttatatgacaaattgcttgtggcaggtgatctgcaatcctttggagagcagctgagaaacaactttgaagagacaaaacagctactccttcaggttgccggtcacaaggatattctggaaggggatccttacctgaagcagcgtctgcggctgcgtgagtcgtacatcactaccttgaacgtttgccaagcctacaccctgaagcggataagggaccctagcttcgaggtgatgtcgcagccggccttgtcgaaggagttcgtcgacagcaaccagcctgccgagctggtccaactgaacgctgcgagcgagtacgcacctggcctggaggacaccctcatcctgacgatgaagggcattgctgccggcatgcagaacacaggctagattgtccacaagaatgcttccagcaggtgcaatcaatcaatcatcaataactccttccatgatgagatggtgaatatgtttaactacccgatccaaaataaaatatggaccaatcattctacgaagcttgattctgaacgcttcgaatttgcatcagtggtgacagcggctgtgtttgcatctttaaacgacagactaaaagcattgtgcaccgcaagatgcagacttgacatgtgcttatagcagaagtattacatggagcacatctcagggtcaggtatattgcaatctcaaaaatcaggagatacacaatcagatggatatgaaatgagaagcaaaattgtgtctgaagaaatgagaagcaagaagacagttaaagggtctgatgggttacagtctgaaaaatcaggggatatgcaatcggagagatatgaaagtgacaaaattttgtccagagaaataagaagcaagaaaacattgaaaggtcagttatcatgctcacctagcattatgcaccataaaatgatcttggcagacaatataatctagcataaaattatatacaacaaattagagattgtagcgttgataaattttcaaggactatatatctatagttagttacagtgagaaataacaaaagttacatatgtaactacaatacatatagactgtaactgggctaaaactgcaagcatgcttgaatttcttcaaaaaataaagaatttcttc

SEQ ID NO: 60 - protein, 968 aa, Oryza sativa
MAAAAGKAAMERHQSIDAQLRLLAPGKVSEDDKLVEYDALLVDRFLDILQDLHGPHLREFVQECYELSAEYENDRDEARLDELGRKLTSLPPGDSIVVSSSFSHMLNLANLAEEVQIAHRRRIKLKRGDFADEASAPTESDIEETLKRLVTQLGKSREEVFDALKNQTVDLVFTAHPTQSVRRSLLQKHGRIRNCLRQLYAKDITADDKQELDEALQREIQAAFRTDEIRRTPPTPQDEMRAGMSYFHETIWKGVPKFLRRIDTALKNIGINERLPYNAPLIQFSSWMGGDRDGNPRVTPEVTRDVCLLARMMAANLYFSQIEDLMFELSMWRCSDELRIRADDLHCSSRKAAKHYIEFWKQIPPNEPYRVILGGVRDKLYYTRERTRHLLTTGVSEIPEEATFTNVEEFLEPLELCYRSLCACGDKPIADGSLLDFLRQVSTFGLALVKLDIRQESDRHTDVLDAITTYLGIGSYAEWSEEKRQDWLLSELRGKRPLFGPDLPQTEEIADVLGTFHVLAELPADCFGAYIISMATAPSDVLAVELLQRECHIKQPLRVVPLFEKLADLEAAPAAVARLFSIDWYMNRINGKQEVMIGYSDSGKDAGRLSAAWQMYKAQEELVKVAKHYGVKLTMFHGRGGTVGRGGGPSHLAILSQPPDTIHGSLRVTVQGEVIEHSFGEEHLCFRTLQRFTAATLEHGMHPPISPKPEWRALMDEMAVVATKEYRSIVFKEPRFVEYFRSATPETEYGRMNIGSRPSKRKPSGGIESLRAIPWIFAWTQTRFHLPVWLGFGGAFKHIMQKDIRNIHTLKEMYNEWPFFRVTLDLLEMVFAKGDPGIAALYDKLLVAGDLQSFGEQLRNNFEETKQLLLQVAGHKDILEGDPYLKQRLRLRESYITTLNVCQAYTLKRIRDPSFEVMSQPALSKEFVDSNQPAELVQLNAASEYAPGLEDTLILTMKGIAAGMQNTG

SEQ ID NO: 61 - DNA, 3055 bp, Oryza sativa
gcattggccgttcggatcgcggtggcgcttcgtgaaggtgggggagaagggggaaaaggagtcggctttcggggagatggcgcgcaatgcggcggacaaggggacgtccatcgacgcgcagctgcggatcctggcgcctaagaagctctcggaggacgacaagcttgtggagtacgacgcgctgctcctcgatcgcttcctcgacatcctccaggatctgcatggggaggacatcagggagacggttcaagaatgctatgaattagctgctgagtatgaaagtaagattgcgtatcgtaggaggataaaactgaagaagggtgattttgctgatgaaaactctgctacaactgaatcaaactttgaggagaccctaaaaaggcttgttggtgagcttaagaagtcccctcatgaggtatttgatgctctcaagaatcaaacaatcgacctggtcctgacagcacatccaactcagtcagtcaggaggtcgctgctacaaaagcatggcaggataagaagttgtttaacaaaactttatgcaaaagacataactccagatgagaagcaggaactcgatgaagcacttaagagagagatccaagccgcctttagaacagatgaaattcggcgagcacctcctacaccacaggatgaaatgcgtgctggaatgagttattttcatgagacaatatggaagggtgtacccaagtttttacgtagggttgatactgcccttaagaacattggcataaacgagcgagtgccctataatgctcctcttattcaattttcttcttggatgggtggagaccgtgatggaaatccaagagtcacaccagaggttacaagggacgtatgcctgttagctagaatgatggctgctaacttatactatgcacagatagaggatctgatgtttgagctatctatgtggcgctgtagtgatgaactacgtgtaaaagctgatcagttacaccgttgcgcaaagaaaaacacaacaaagcactatatagagttctggaaacaagttcctccgagtgaaccctatcgtgtaatactgagcaatgtcagagataagttgtacaatacacgcgagcgagcacgccatttattagccagtggattttctgaaattcctgacgaagcaacattcactgatgttgagcagttcttggagcctcttgagctctgttacaggtctctctgtgcctgtggtgataattctattgcagatggcagtcttcttgactttctacggcaagtgtccacatttggactatcccttgttagacttgatattaggcaagaatctgaccgacatactgatgttatggatgccataactcaataccttggaattggatcctatcgtgaatggtcagaggagaaacgccaagaatggcttctgtcagaactcaatggaaagaggccattatttggtcctgaccttccccagacggatgaaattgctgatgccctagatacttttcatgtgatagcagaactaccctatgatagctttggtgcatatgtaatatccatggcaacagctccttcagatgttctagcagttgagcttctgcaacgtgaatgtcatgtgaagaagccactgagagttgtgccattgtttgaaaaactagcagatctggaagcagcaccagcagctcttgcccgacttttctctgttgactggtacagaaataggatcgacggaaagcaggaagtaatgattgggtattcagattctggaaaagatgctggccgtttctctgcagcttgggaactgtataaagctcaagaggagcttattaaagttgctaagcagtttggggttaagttgactatgtttcatgggcgaggtggaactgttggaagaggtgggggtcctacacaccttgctatactgtcacaacctccagataccattcatggatcacttcgtgtgactgttcaaggtgaagtcattgagcaatcttttggagaggagcatttgtgttttaggacacttcaacgttttacatctgctactcttgagcatggtatgcatccaccaatttcaccaaagccagaatggcgtgctttgatggatgaaatggccgctgttgctacaaaagaataccggtccattgtcttccaagaggcacgatttgttgaatatttccgccttgcaacaccagagttggaatatggtaggatgaatattggaagtaggccatcaaaacgaaagcctagtggaggcattgaatcacttcgtgcaattccttggatctttgcttggacacaaactcgattccacctaccagtgtggcttggttttggcgcagcgttcaagcatgtcttgcagaaggacatacgcaatcttcagatccttcaggagatgtacaacgaatggccatttttcagggttacaatagacttggttgagatggtgtttgctaagggtgatcctggtatagcagctctgtatgacaagttgctagtttctgaggatttgtggccatttggtgctcgtcttagagcaaactatgaagaaacaaagcaacttcttctacaggttgctggacacaaagaccttctggagggagatccttacttgaggcagagactgcgtatccgtgattcctacatcacagcgctgaatgtttgccaagcttgcacgctaaagcgtatcagggaccctggcttccatgtaagcccccgagctcacctctccaaggacataatggactcagggaagccagccgctgagcttgtgaagctgaacacaacaagcgagtacggcccaggcctcgaggacactctcatcctgaccatgaagggcatcgctgctggtatgcagaacactgggtgaagtagaactggttcgttctgatggtgtgttatggtgtcatgaattagtgtagtttgcacctctatgcaatcactatttgcagtttgcacctctgaactctatatgtaaataaggggatgctaagcaacgtataactaagactggttatatccatggatattacctgtttagcatgttatatatcgaactcttatgctgttcacc

SEQ ID NO: 62 - protein, 924 aa, Oryza sativa
MARNAADKGTSIDAQLRILAPKKLSEDDKLVEYDALLLDRFLDILQDLHGEDIRETVQECYELAAEYESKIAYRRRIKLKKGDFADENSATTESNFEETLKRLVGELKKSPHEVFDALKNQTIDLVLTAHPTQSVRRSLLQKHGRIRSCLTKLYAKDITPDEKQELDEALKREIQAAFRTDEIRRAPPTPQDEMRAGMSYFHETIWKGVPKFLRRVDTALKNIGINERVPYNAPLIQFSSWMGGDRDGNPRVTPEVTRDVCLLARMMAANLYYAQIEDLMFELSMWRCSDELRVKADQLHRCAKKNTTKHYIEFWKQVPPSEPYRVILSNVRDKLYNTRERARHLLASGFSEIPDEATFTDVEQFLEPLELCYRSLCACGDNSIADGSLLDFLRQVSTFGLSLVRLDIRQESDRHTDVMDAITQYLGIGSYREWSEEKRQEWLLSELNGKRPLFGPDLPQTDEIADALDTFHVIAELPYDSFGAYVISMATAPSDVLAVELLQRECHVKKPLRVVPLFEKLADLEAAPAALARLFSVDWYRNRIDGKQEVMIGYSDSGKDAGRFSAAWELYKAQEELIKVAKQFGVKLTMFHGRGGTVGRGGGPTHLAILSQPPDTIHGSLRVTVQGEVIEQSFGEEHLCFRTLQRFTSATLEHGMHPPISPKPEWRALMDEMAAVATKEYRSIVFQEARFVEYFRLATPELEYGRMNIGSRPSKRKPSGGIESLRAIPWIFAWTQTRFHLPVWLGFGAAFKHVLQKDIRNLQILQEMYNEWPFFRVTIDLVEMVFAKGDPGIAALYDKLLVSEDLWPFGARLRANYEETKQLLLQVAGHKDLLEGDPYLRQRLRIRDSYITALNVCQACTLKRIRDPGFHVSPRAHLSKDIMDSGKPAAELVKLNTTSEYGPGLEDTLILTMKGIAAGMQNTG

SEQ ID NO: 63 - DNA, 2832 bp, Welwitschia mirabilis; identical to SEQ ID NO: 15
  misc_feature (1741)..(1743): n is a, c, g, or t

SEQ ID NO: 64 - protein, 944 aa, Welwitschia mirabilis; identical to SEQ ID NO: 16
  UNSURE (581)..(581): Xaa can be any naturally occurring amino acid

SEQ ID NO: 65 - DNA, 4776 bp, Chlamydomonas reinhardtii; identical to SEQ ID NO: 17

SEQ ID NO: 66 - protein, 1221 aa, Chlamydomonas reinhardtii; identical to SEQ ID NO: 18

SEQ ID NO: 67 - DNA, 3099 bp, Glycine max; identical to SEQ ID NO: 19

SEQ ID NO: 68 - protein, 1032 aa, Glycine max; identical to SEQ ID NO: 20

SEQ ID NO: 69 - DNA, 3159 bp, Ricinus communis; identical to SEQ ID NO: 21

SEQ ID NO: 70 - protein, 1052 aa, Ricinus communis; identical to SEQ ID NO: 22

SEQ ID NO: 71 - DNA, 1568 bp, Oryza sativa
cccacgcgtccgcccacgcgtccgggacaccagaaacatagtacacttgagctcactccaaactcaaacactcacaccaatggctctccaagttcaggccgcactcctgccctctgctctctctgtccccaagaagggtaacttgagcgcggtggtgaaggagccggggttccttagcgtgagcagaaggccaagaagccgtcgctggtggtgagggcggtggcgacgcggcgggccggtggcgagccccggcgcgggcacgtcgaaggcggacgggaagaagacgctgcggcagggggtggtggtgatcaccggcgcgtcgtcggggctcgggctcgcggcggcgaaggcgcttggcggagacggggaagtggcacgtggtgatggcgttccgcgactttcctgaaggcggcgacggcggcgaaggcggcggggatggcggcggggagctacaccgtcatgcacctggacctcgcctccctcgacagcgtccgccagttcgtggacaacttccggcgctccggcatgccgctcgacgcgctggtgtgcaacgccgcacatctaccggccgacggcgcggcaaccgacgttcaacgccgacgggtacgagatgagcgtcggggtgaaccacctgggccacttcctcctcgcccgcctcatgctcgacgacctcaagaaatccgactacccgtcgcggcggctcatcatcctcggctccatcaccggcaacaccaacaccttcgccggcaacgtccctcccaaggccgggctaggcgacctccgggggctcgccggcgggctccgcgggcagaacgggtcggcgatgatcgacggcgcggagagcttcgacggcgccaaggcgtacaaggacagcaagatctgtaacatgctgacgatgcaggagttccaccggagattccacgaggagaccgggatcacgttcgcgtcgctgtacccggggtgcatcgcgacgacgggcttgttccgcgagcacatcccgctgttccggctgctgttcccgccgttccagcggttcgtgacgaaggggttcgtgtcggaggcggagtccgggaagcggctggcgcaggtggtgggcgacccgagcctgaccaagtccggcgtgtactggagctggaacaaggactcggcgtcgttcgagaaccagctctcgcaggaggccagcgacccggagaaggccaggaagctctgggacctcagcgagaagctcgtcggcctcgtctgagtttattatttacccattcgtttcaactgttaatttcttcggggtttagggggtttcagctttcagtgagagaggcctgtcaagtgatgtacaattagtaatttttttttacccgacaaatcatgcaataaaaccacaggcttacattatcgatttgtccacctaaattaagtttcaactgttaatttcttcggggtttagggggtttcagctttcagtgagagaggcctgtcaagtgatgtacaattagtaatttttttttacccgacaaatcatgcaataaaaccacaggcttacattatcgatttgtccacctaaattaagt

SEQ ID NO: 72 - DNA, 53 bp, Artificial sequence
  primer: prm08763
ggggacaagtttgtacaaaaaagcaggcttaaacaatgaacttggcagttcct

SEQ ID NO: 73 - DNA, 48 bp, Artificial sequence
  primer: prm08764
ggggaccactttgtacaagaaagctgggttcaaccagtattacgcatt

SEQ ID NO: 74 - DNA, 1295 bp, Capsicum annuum
gccaactttgtacaaaaaagcagtcttaaacaatggaagaaattcaagtaccaccttatttcctctgtccgatttcactggagatgatgaaagatccagtcacgatctcgactggaataacatacgatcgagagaacatcgagagatggatattctcagctaagaacaatacgtgtccggttacgaagcaatcccttacgagcatagagttgacccctaatgtcactctacgacgattcatccaatcgtggtgtactctcaatgcgtcccatggcatcgagaggttccctacaccgaagcctccggtcagcaaagctcaaatcttaaagctcatgaaagaagcgaaatcgcgcgaaatgcaaatgaaatcactcaacacacttagatccatagcttctgtgaacgatgctaacaagcgttgcatggagtctgcgggcgcagcggagttcttagcctctgttgtgattgattcgagtgatgtgttgggtgaagagggtttcatgagtactaaagatgaagcattaagcatcctctaccaactcaagttatcagaagatggattgaggtcactcatcacgagtggaaatggtgaattcatcgagtcactgacacgcgtcatgcagcgtgggagctatgagtcaagggcttacgcggtgatgctgatgaaagacatgttcgaagcatccacactaccaactctattttcgagcttgaagaaagagttcttcgctcaagtggttcgagtcttgagggatgagatctctcaaaaggccaccaaagcgtcattgcaagtgctagcgcacgcgtgtccatttgggaggaacagagtgaaagcagctgaggcaggagccgttagggttttggtggaccttctgctcgattcatccgagaaaaggacctgcgaactgatgctaatcttgctggatcaaatttgtcagagcgcagaagggagagccgagctgttgaatcatccgggagggttagccatcgtctcgaagaaaatacttagggtttcgaaagtagggagcgaaagggcaatcaagatattgcattcgatatcaaagttttcatcaacacaaagtgttgttcaagagatgttgagtttgggtgttgtggcaaagctttgtttggtacttcaagttgattgtggaagtaaagctaaggatagagctagagatattctcaaaattcatgcaaaggcatggaggaattctccttgtatacctatgaatttattatcttcatatccattttaggaaaataggaccaaaagagcacccagctttcttgtacaa

SEQ ID NO: 75 - protein, 407 aa, Capsicum annuum
MEEIQVPPYFLCPISLEMMKDPVTISTGITYDRENIERWIFSAKNNTCPVTKQSLTSIELTPNVTLRRFIQSWCTLNASHGIERFPTPKPPVSKAQILKLMKEAKSREMQMKSLNTLRSIASVNDANKRCMESAGAAEFLASVVIDSSDVLGEEGFMSTKDEALSILYQLKLSEDGLRSLITSGNGEFIESLTRVMQRGSYESRAYAVMLMKDMFEASTLPTLFSSLKKEFFAQVVRVLRDEISQKATKASLQVLAHACPFGRNRVKAAEAGAVRVLVDLLLDSSEKRTCELMLILLDQICQSAEGRAELLNHPGGLAIVSKKILRVSKVGSERAIKILHSISKFSSTQSVVQEMLSLGVVAKLCLVLQVDCGSKAKDRARDILKIHAKAWRNSPCIPMNLLSSYPF

SEQ ID NO: 76 - protein, 65 aa, Artificial sequence
  U-box protein domain
FLCPISLEMMKDPVTISTGITYDRENIERWIFSAKNNTCPVTKQSLTSIELTPNVTLRRFIQSWC

SEQ ID NO: 77 - protein, 14 aa, Artificial sequence
  Class III U-Box polypeptide motif VII
GITYDRENIERWIF

SEQ ID NO: 78 - protein, 8 aa, Artificial sequence
  Class III U-Box polypeptide motif VIII
QSWCTLNA

SEQ ID NO: 79 - protein, 8 aa, Artificial sequence
  Class III U-Box polypeptide motif IX
GRAELLNH

SEQ ID NO: 80 - protein, 13 aa, Artificial sequence
  Class III U-Box polypeptide motif X
GLAIVSKKILRVS

SEQ ID NO: 81 - protein, 9 aa, Artificial sequence
  Class III U-Box polypeptide motif XI
KLCLVLQVD

SEQ ID NO: 82 - protein, 3 aa, Artificial sequence
  Class III U-Box polypeptide motif XII
SYP

SEQ ID NO: 83 - DNA, 1619 bp, Arabidopsis thaliana
ctaacttattcaaaccaattcacatcttcccaaacccaactactacaacttgtattaagaaaaagatatattcccttagcttctttgatcaatatattcgtcagggttctcgtcaaagtcctcagcatcttcatcatatgtccggaggaataatggatgaagagatcgagattcctccgttcttcctttgtcctatctctttggagatcatgaaagatccagtgatagtctctaccggaataacctacgacagagacagcatcgagaaatggctatttgcaggcaagaaaaactcgtgtccggtcaccaaacaagacataaccgacgcggatctcaccccgaatcacactctacgccgtctcatccaatcttggtgcaccctaaacgcctcctacggcgtcgagaggatccctaccccaagacctccgatttgtaaatctgagatcgaaaagctcattagagattcagcctcttcccatgaaaaccaagtcaagtgtctcaaacgacttcgtcagattgtgtcggagaacgcgaccaacaagcggtgtttagaggcagcgggagtaccggagttcttggccaacatcgtaagcaacgactcagaaaatgggagtttgaccgacgaagccctcaacttactttaccacctcgagacctcagagacagtcctcaagaatcttttaaacaacaagaaagataacaatatcgtaaagtcgttgacgaagatcatgcagcgtgggatgtacgagtccagagtctatgccactttgcttctcaagaacattctcgaagtagcggatccaatgcagagtatgactctcaagccagaggttttcactgaggtcgtccagatcttggacgaccggatctcgcagaaggcgaccaaagctgccatgcatatattggtgaacatatgcccatggggaaggaacagacacaaggccgtggaagctggagtaatctctgtgatcatcgagcttctcatggacgagagcttcacatcagagaggagaggtccagagatggcgatggtggttcttgatctgttgtgtcagtgtgcggagggacgagccgagttcttgaaccacggagcagccatagcggtggtgtgcaagaagatacttagggtttcacagacagcaagcgatagagcggttagggttttgttgtcggtgggaaggttctgcgcaacgcctgctttgttgcacgagatgttacagttgggggttgtagcgaagctttgtcttgtgcttcaagtaagctgtggaggtaagaccaaagagaaggcaaaggagttgcttaagttgcacgctagggtctggaaggactcgccttgtctcccaaaaaacatgattcttgcatatccctgctgatgaaaacgaagaaaacaatacaaacaagtccaattctcagtgagagcaatcacatatatgagagatgctgttgaaaaaactaaaggagtattcaattattcatatcattaatccaattttccttaggtttcttatttcgtacttttgatgttctcaatgtagataatagtggaaaatgttcatcaaatatttttttttatgaaaaactgcaaagatatcatatataaaatcacaagttaccaggct

SEQ ID NO: 84 - protein, 435 aa, Arabidopsis thaliana
MDQEIEIPSFFLCPISLDIMKDPVIVSTGITYDRESIEKWLFSGKKNSCPVTKQVITETDLTPNHTLRRLIQSWCTLNASYGIERIPTPKPPICKSEIEKLIKESSSSHLNQVKCLKRLRQIVSENTTNKRCLEAAEVPEFLANIVSNSVDTYNSPSSSLSSSNLNDMCQSNMLENRFDSSRSLMDEALSVLYHLDTSETALKSLLNNKKGTNLVKTLTKIMQRGIYESRAYAALLLKKLLEVADPMQIILLERELFGEVIQILHDQISHKATRSAMQILVITCPWGRNRHKAVEGGTISMIIELLMDDTFSSERRNSEMAMVVLDMLCQCAEGRAEFLNHGAAIAVVSKKILRVSQITSERAVRVLLSVGRFCATPSLLQEMLQLGVVAKLCLVLQVSCGNKTKEKAKELLKLHARVWRESPCVPRNLYDSYPA

SEQ ID NO: 85 - DNA, 1645 bp, Arabidopsis thaliana
gctaacttattcaaaccaattcacatatctcctaaatctcaacgactgcactttgaagctttttgtttagattcgttcgtcgtttccattgattaagtctacttcttttttttcatattttcgagcgggtcaaatggatcaagagatagagattccttccttcttcctttgtccaatctctctagatatcatgaaagatccggtgatagtttccaccggaataacctacgaccgagaaagcatcgagaagtggctcttttccggtaagaaaaactcatgtccagtcaccaaacaagtcataaccgaaactgatcttaccccaaaccacactcttcgccgtttgattcaatcttggtgtaccctcaacgcatcatatggtatagagaggatcccaactccaaaacctccgatctgtaaatcggagatcgaaaagcttatcaaagagtcgtcatcttcgcatctaaaccaagtcaaatgcctcaaacgacttcgtcaaatagtatctgagaatacaaccaacaaacggtgcttagaagccgcagaagttccggagtttttggcaaatatcgtaagcaactctgtagatacgtataactctccttcttcttcactttcttcttcgaatctcaacgacatgtgtcagtcaaacatgttggagaatcgatttgattcttcaagaagcttgatggacgaagccctaagcgtactctaccatcttgacacatcggagacagccctcaagagtcttttaaacaacaagaaaggaacaaatcttgtgaaaacgttgacgaagattatgcaacgtgggatctacgagtcaagagcctatgcggctttgcttctcaagaagctcctggaagttgcggatccaatgcagatcatattgttggaacgagaacttttcggtgaggtgattcaaatcttgcacgaccagatctctcacaaggcgacaagatcagcaatgcaaatcttggtgatcacatgtccatggggaaggaatagacacaaggcagtggaaggtggaacaatctcgatgataatcgagcttttaatggacgatactttctcatcagagagaaggaattcagagatggcgatggtggttcttgatatgttatgtcagtgcgcagaaggaagagctgagttcttgaatcacggtgccgctattgcggttgtgtctaagaagatattgagggtctcacaaataactagtgaaagggcagttagggttttgctttcggttgggaggttctgcgcgacaccctctttgttgcaggagatgttgcaattgggagttgtagcaaagctgtgtctggtacttcaagttagctgtggtaacaagactaaagaaaaggctaaagaattgcttaagcttcacgctagggtttggagggaatcaccttgtgtcccaagaaatttgtatgattcgtatcctgcttgaacaacgtacatgtttgaataattctcatcagatacaaacaattctttgagaattattcttcgtataagttcattttaaaacaaaaaagagtggtttaaattttgctcaaactctgattttctttcatttgtttttgttttattatctttcaatgtttatcattatgtgtagataatagtggacatattttcatgaaattatgaa

SEQ ID NO: 86 - protein, 411 aa, Arabidopsis thaliana
MSGGIMDEEIEIPPFFLCPISLEIMKDPVIVSTGITYDRDSIEKWLFAGKKNSCPVTKQDITDADLTPNHTLRRLIQSWCTLNASYGVERIPTPRPPICKSEIEKLIRDSASSHENQVKCLKRLRQIVSENATNKRCLEAAGVPEFLANIVSNDSENGSLTDEALNLLYHLETSETVLKNLLNNKKDNNIVKSLTKIMQRGMYESRVYATLLLKNILEVADPMQSMTLKPEVFTEVVQILDDRISQKATKAAMHILVNICPWGRNRHKAVEAGVISVIIELLMDESFTSERRGPEMAMVVLDLLCQCAEGRAEFLNHGAAIAVVCKKILRVSQTASDRAVRVLLSVGRFCATPALLHEMLQLGVVAKLCLVLQVSCGGKTKEKAKELLKLHARVWKDSPCLPKNMILAYPC

SEQ ID NO: 87 - DNA, 1212 bp, Medicago truncatula
atggatgaaattgatgttccttcacattttctttgcccaatttccctacaacttatgaaagatcctgtcacactttccacaggaattacgtacgacagagaaaacatagaaaaatggttattttcattccaaaacaatacttgtcctgttacaaaacaaaccttattagaaaccgatcttaataatcttataccaaaccatactttacgtcgtttgattcaatcttggtgtacccttaatgcttcatttggtgttgaacgtattccaacaccaaaatcaccaatagatagaacacagattcttaaactcctcaatgaagcaaagaaattcccagaaaaacaactcaattgtcttgtaaagcttcgttctatcgtcttcgaaagcgaaaggaacaaaaaatgtttggaatctgcaggtgcaatagagtttctagctttaaccatgaagaacaatttaaattcaagttctctgagtgaagcagctattgaaattttgtttcatcttaacccttctgaagaacatgttaagaatctgataaacaatgaaagcattcaatttattgagtcattgtttcatgttttgaagcttggaagctaccaatctagaggttatgcaacaatgctgttgaaatcggcgtttgaagtatccgatccgattcaattaataagcgtaaaaaaggcgatttttgaagagataatgagagtgctagttgataagatctcacaacaagcttcaaaagctgcattaaaactacttctggagcttttaccatggggaagaaaccgaattaaagcggttgaaggaggcgtggttttagtcctaatcgaacttcttttcgatgtttcggaaagaagggtttgtgaattgatgttaataggtttggatcaaatttgtggttgtgcagaagggagagcagaattgttgaatcatggagcaggattggctattgtgtcaaagaaaattttgagggtttctcatgttgcaagtgatagaggtgttagaattatgagttctatttgtaggtattctgcaaattctagagttttacatgaaatgttgcatgttggagcagtttcaaagttgtgtttggtgcttcaagttgatagtaatttcaagacaaaagagagggctaaggagatactcaaattgcattctactgtttggaagaattctacatgtattcctgttccattgttatcttcttatccatga

SEQ ID NO: 88 - protein, 403 aa, Medicago truncatula
MDEIDVPSHFLCPISLQLMKDPVTLSTGITYDRENIEKWLFSFQNNTCPVTKQTLLETDLNNLIPNHTLRRLIQSWCTLNASFGVERIPTPKSPIDRTQILKLLNEAKKFPEKQLNCLVKLRSIVFESERNKKCLESAGAIEFLALTMKNNLNSSSLSEAAIEILFHLNPSEEHVKNLINNESIQFIESLFHVLKLGSYQSRGYATMLLKSAFEVSDPIQLISVKKAIFEEIMRVLVDKISQQASKAALKLLLELLPWGRNRIKAVEGGVVLVLIELLFDVSERRVCELMLIGLDQICGCAEGRAELLNHGAGLAIVSKKILRVSHVASDRGVRIMSSICRYSANSRVLHEMLHVGAVSKLCLVLQVDSNFKTKERAKEILKLHSTVWKNSTCIPVPLLSSYP

SEQ ID NO: 89 - DNA, 1480 bp, Nicotiana benthamiana
  misc_feature (661)..(661): n is a, c, g, or t
  misc_feature (770)..(770): n is a, c, g, or t
gaaagaacgcatctttactcttctctctctcgttatatataatttgagtcttgtttttatttgtaaagaagaaaaaaaatagatatggaagaagtagagatacctcaatattttttgtgtcctatatcacttcaaataatgaaagatccggtgacgacggtgaccggaataacgtacgaccgggaaagcatcgagatgtggttgttaacggcggaggaagagacggagacggcggcgtgtccggtaacaaagcaacctttgccaaaagacaccgagttgttgacaccaaatcatatgctccggcggctaattcaagcttggtgcatagtcaacgcagagaaaggcgttgaccgaattccaacaccaaagtatcctatgaacaaatcgaatattctccgattacttcgacaagttaataataatgatcatcagctttgtgctgaagctttgaggaaaatggctgatttggttagtgagaatgaaaagaacaggaaatgcatggaacaagctggtgcaattaaggctatggtttgtttcatagtaaaaagtttcaaatatgagaaattatttcctggtattgaagaagctttaaggattttccatttaatttggaatccaaaatccgaaaacaagcagtatgtaaaggataaccctgatttanttcaagcaattttatggattttaaagagcaatttgaataccagtcacgtcctagtcaagactcatgcaatgatggttttgaagaacgtgacagaagtttcgagttcgantcttttaacaggattagaccccgagtttttccaacaaatggcgaatacattgcgaaaaaatggaaagtactacatctctcaacaagcaacaaaagcagctttacaagtgctaatagatgcatgtctatggggaagaaataggctaaaaatcgtcgaatcgggagccattttcgagctgattgagcttgaattatctaaccctgagaaaagggttagtgaattagtattctgtctattggctaatctatgcgtattagctgatgggagagcagaattgttgaaacatgcagctggaattgcagtggtcacaaaaaggacactaaggatatcttcagctacagatgatagtgcacttcaaattcttggtttaatttcaaagttttctgccacaaacgaagtgttattggaaatgttaagggtaggaggggtatcaaaactttgcatggcaattcaagcagattgtgagcctcatttgaagaagaaagcaagagagatattgagagcacattctcatgtttggagtaattctccttgtatctccttgtatacagtttatcttttgacagatttcctggacaatagcaagatttgagccctataaccttgaatagttttttttttccttgtataaatacagctagccaacatactgccttttttgttatactgtaaaacagcatctaaattacccataaaaaaaaaaaaaaaaa

SEQ ID NO: 90 - protein, 425 aa, Nicotiana benthamiana
  UNSURE (193)..(193): Xaa can be any naturally occurring amino acid
  UNSURE (229)..(229): Xaa can be any naturally occurring amino acid
MEEVEIPQYFLCPISLQIMKDPVTTVTGITYDRESIEMWLLTAEEETETAACPVTKQPLPKDTELLTPNHMLRRLIQAWCIVNAEKGVDRIPTPKYPMNKSNILRLLRQVNNNDHQLCAEALRKMADLVSENEKNRKCMEQAGAIKAMVCFIVKSFKYEKLFPGIEEALRIFHLIWNPKSENKQYVKDNPDLXQAILWILKSNLNTSHVLVKTHAMMVLKNVTEVSSSXLLTGLDPEFFQQMANTLRKNGKYYISQQATKAALQVLIDACLWGRNRLKIVESGAIFELIELELSNPEKRVSELVFCLLANLCVLADGRAELLKHAAGIAVVTKRTLRISSATDDSALQILGLISKFSATNEVLLEMLRVGGVSKLCMAIQADCEPHLKKKAREILRAHSHVWSNSPCISLYTVYLLTDFLDNSKI

SEQ ID NO: 91 - DNA, 1643 bp, Oryza sativa
cattcccttcaactcaaactcctcttcttcttcttcctcccatcgatctctctccttcgcgatcaactcgagctcgaactcgtctcgtggtagtagcgagcatggaggaggcggcggcggaggtgccgtcctacttcctgtgcccgatctcgctggagatcatgagggacccggtgacgctggcgacggggatcacctacgaccggagcagcatcgagcggtggatgttcggcggcggcggcggcgacggggggaaggggacgtgcccggtgacgcggcggcagctggcgccggcggagcgggaggcgacgcccaaccacacgctgcggcggctcatccaggcgtggtgcgccgcgcacgccgtcgagaggttccccaccccgcgcccgcccgtcgactcctgccgcgtcgccgcgctcgtcgacgaggggacgacgacgatgctcggcggcggcggcaggcagcggcagctcgccgcgctccgggagatcaaggccatcgccgccgagagcgaccgcaacaagcgctgcgtcgaggccacgcccggcgccgtcgagttcctcgtctccgtcgtcgtccagagccatgccgccgcctccacctcagccagctcggacgacgacgacctgttcgactcggtgatcgattcccccatgtcgacgagctcgccggaggaggaggccctgggcgtgctctactccctcaagccgtccgagcccaccctgcgccgcgtcctcggcaaggacaatggcgtcggcttcctcgacaccctcgcctccgtgctccgccgcccgagctaccgttcgcgcgcgtatgccatcctcctcctgaaggcggtgacgtcggcgatgccgccggagcggctgatggcggtgagccccgagctggtggaggaggtggtccgggtggtgtccgacggcgtgtcgtcgaaggcggtgaaggcggcgctgcacgtgctgtgccggctgtgcccgtgggggcggaaccgcgtgaaggcggtggaggccggcgcggtggcggcgctggtggagctcctcctcgacgaggagggcggcggcgggcggcggcgcgcggcggagctggcggtggtggcgatcgaccacctgtgcgggtgcgcggaggggaggtcggagctggtggcgcacccggcggggctcgccgtggtgtccaagagggcgatgcgggtgtcgccggcggccaccgagagcgccgtgcgcgcgctccacgccgtcgcgaggaacgcggcgacgccggccgtgctgcaggagatgctcgccgtcggcgtggtggcgaagctgctgctggtgctgcaggcggacggcggcgagcgcgccagggcgagggcgagggagatgctcagggcgaacgctagggtttggaaggactcgccatgcttgcaagctcaccttaaggcttcttacccctcctgatcatttcatcaccatcacatccatccaccgatctattaattattattaattgctaagaggagcacatgctttaatttgcactcctcttagtagttaattagattttgtgattacttttagttctttaatttgtttatgatctgaatgtacaaaatacactgtaaatctttcattaattctgtacaaaaatacactataaatctttcattgcct

SEQ ID NO: 92 - protein, 442 aa, Oryza sativa
MEEAAAEVPSYFLCPISLEIMRDPVTLATGITYDRSSIERWMFGGGGGDGGKGTCPVTRRQLAPAEREATPNHTLRRLIQAWCAAHAVERFPTPRPPVDSCRVAALVDEGTTTMLGGGGRQRQLAALREIKAIAAESDRNKRCVEATPGAVEFLVSVVVQSHAAASTSASSDDDDLFDSVIDSPMSTSSPEEEALGVLYSLKPSEPTLRRVLGKDNGVGFLDTLASVLRRPSYRSRAYAILLLKAVTSAMPPERLMAVSPELVEEVVRVVSDGVSSKAVKAALHVLCRLCPWGRNRVKAVEAGAVAALVELLLDEEGGGGRRRAAELAVVAIDHLCGCAEGRSELVAHPAGLAVVSKRAMRVSPAATESAVRALHAVARNAATPAVLQEMLAVGVVAKLLLVLQADGGERARARAREMLRANARVWKDSPCLQAHLKASYPS

SEQ ID NO: 93 - DNA, 1591 bp, Oryza sativa
agtactccccatctcccatccaccattgctgccatctccaccacatacaatacaacaactactactcagctcaccatcaccggagcaagagccaagaagacgacgacgacgacgagctagcagcagcattgcaaccgacggcaatggaggagcagcagcaggtggaggtggaggtggaggtgccgtcctacttcgtgtgccccatctcgctgcagatcatgcgcgacccggtgacgctccccaccggcatcacctacgaccgcgacggcatcgagcgatggctcctcaccgccggcacctgcccgctcaccaagcagcccgtgccgcccgactgcgaccccacgcccaaccacaccctgcgccgcctcatccagtcgtggtgcgccctccacgccgaccatggcgtcgacctcgtccccacccccaagccccccgccgaccgcgcccgcgtcgccgacctcgtctcccgcctccgcgccgccacgagctccgctgccctcctcgacgcgctgcgcgagctcagggacgttgccgccgagagcgagcgtaacaggaagctcctcgccgccgtccccggcgcggtggatgttctggccgccgtcgtcgtcgcgtcgtgtcgagacgccaaggccgcgtgcgacgaggccctcgagatcgtctgctcgctggagctctcggagcggtgcctggcgcggctcgtcgagaggaacgaggagctcgtcgacgcgctcgtcgccacgctgcagcggacgaacaccacgtcccgggcgcacgcggcgctgctcctggaggccgtgacggcggtcatgccgtcgaacaggctggtgtccctcccggaggaggtgttcggtgaggcggtgcagctgctccgcgacagggtatcgagcccggcgacgagggcggcgctgcacgtgctggtcggcacgacgtcgtggggccgcaaccgcgtgaaggcggtggacgccggcgcggtggcggtgctggtcgacatgctcctggacgggccagtcgagcggcgcgggtgcgagctggccctggcggcgctggaccggatgtgcgggtgcgcggaggggcgggcggcgctggtgtcgcacggcgcgggcgtggcggtggtggggaggaaggtgctgagggtgtcggaggtggcgagcgagaaggcggtgcgggtgctgcggtcggtggcgaggcacgcggcgacggcggcggtggtgcaggagatggggcagacgggggcggtggagaagctgtgcgtggtggcgcagtcggagcagtgcggggagaggacgcgggagcgggcgcgggagacgctgcggctgcacgccagagcgtggaggaactcgccctgcttgcagcctcacctccaggccctctacccttcttgctgatcgaattctgattcatgatcaccggcctcatcactagctagctaccaacatacagcacagagagaattgaacacttgttcgattcttcctttcgctcgattaattttattgagttgagatcgttcgatgtagtcctatgaatcaaagtgtacagatcgacgcaatagatgaactaaatcatgcgcgagctttttttgtttgggtct

SEQ ID NO: 94 - protein, 413 aa, Oryza sativa
MEEQQQVEVEVEVPSYFVCPISLQIMRDPVTLPTGITYDRDGIERWLLTAGTCPLTKQPVPPDCDPTPNHTLRRLIQSWCALHADHGVDLVPTPKPPADRARVADLVSRLRAATSSAALLDALRELRDVAAESERNRKLLAAVPGAVDVLAAVVVASCRDAKAACDEALEIVCSLELSERCLARLVERNEELVDALVATLQRTNTTSRAHAALLLEAVTAVMPSNRLVSLPEEVFGEAVQLLRDRVSSPATRAALHVLVGTTSWGRNRVKAVDAGAVAVLVDMLLDGPVERRGCELALAALDRMCGCAEGRAALVSHGAGVAVVGRKVLRVSEVASEKAVRVLRSVARHAATAAVVQEMGQTGAVEKLCVVAQSEQCGERTRERARETLRLHARAWRNSPCLQPHLQALYPSC

SEQ ID NO: 95 - DNA, 1353 bp, Oryza sativa
tcagcgagggtaggaagcattcaagtgcgaggccaagcatggcgagtccctccacaccctggcgtgcatcttgagcatctccctcgccctcgccctcgtccgctcgccggaggcgccgacctgcaccaggaagagcagcctcgccaccacgccgacggccagcatctcctgcagcaccgccgacgtcgccgagtgcctcgccacggcgtgcagcgcgcgcacggcgctctcggcgcccgccgcggcgggcagccgcgtcgccgcgcacgccaccgccgcgagccccgccgggtgcgccaccagcgccaggcgcccctccgcgcagccgcagatgtggtcgatcgccacggcggcgagctcgcacgcgcgccggtcgccgccgccgccgccgcagccctcgtcgaggaggaggcgcacgagcgccgacacggcgccggcgtcgaccgccttgacgcggttccggccccacgggcagagccggcagagcacgtggagcgccaccttgaccgccttcgccgacggcctgtccgccaccacccccaccacgccgtcgaccagcgcggcgctcgccgacgtcagccgcgcgggggccatcgccgggagcgccgatttcagcaggtggattccctgcatccgcgagaggtagctcggccgccgcagcacgcacgccatggtttccaagaaatcctcaccgccgctgtcctccaagaccctcttgaagctctcctcggagagcttgagcgaatgcaggatgctcagggccgcctcctccggcgagctcgccttcgccggatcatgcacgccgccgcacgtcgtctcttccggcttggccgacgtcgcgtcgtccacgcccgccacggaggtgcgctccttgacgacggacaggaggaactccacggcgccggaggcgccctggacgcaccgccggttgcggtcgctctcggcgacgatgtcggcgagctccctcagcgaagccatcagctcctcccgctgacgacgccggcgcagcagcggccgcgcggcgtccacgatggcggcgacgcgggcggcgtcgacgggggggcgcggggtggggaagcgctcgacggcgtggacggcgcaccacccctgtatgaggcggcggagcgtgtggttgggcgtgggctcccggtccgccggcgccagccgctgcttggtcaccgggcactcgccgtggccgtcggtgaacacccaccgctcgatgctctcccggtcgtaggtgatccccgtcgacagcgtcaccgggtcccgcatgatctccagcgagatcgggcacatgaagtaggacggcacctccaccgccggcgccgccgccggcgacgactcctcacccat

SEQ ID NO: 96 - protein, 450 aa, Oryza sativa
MGEESSPAAAPAVEVPSYFMCPISLEIMRDPVTLSTGITYDRESIERWVFTDGHGECPVTKQRLAPADREPTPNHTLRRLIQGWCAVHAVERFPTPRPPVDAARVAAIVDAARPLLRRRRQREELMASLRELADIVAESDRNRRCVQGASGAVEFLLSVVKERTSVAGVDDATSAKPEETTCGGVHDPAKASSPEEAALSILHSLKLSEESFKRVLEDSGGEDFLETMACVLRRPSYLSRMQGIHLLKSALPAMAPARLTSASAALVDGVVGVVADRPSAKAVKVALHVLCRLCPWGRNRVKAVDAGAVSALVRLLLDEGCGGGGGDRRACELAAVAIDHICGCAEGRLALVAHPAGLAAVACAATRLPAAAGAESAVRALHAVARHSATSAVLQEMLAVGVVARLLFLVQVGASGERTRARAREMLKMHARVWRDSPCLASHLNASYPR

SEQ ID NO: 97 - DNA, 1248 bp, Oryza sativa
atggaggaggcggcggcggaggtgccgtcctacttcctgtgcccgatctcgctggagatcatgagggacccggtgacgctggcgacggggatcacctacgaccggagcagcatcgagcggtggatgttcggcggcggcggcggcggcggcgggaaggggacgtgcccggtgacgcggcggcagctggcgccggcggagcgggaggcgacgcccaaccacacgctgcggcggctcatccaggcgtggggacgacgacgatgctcggcggcggcggcaggcagcggcagctcgccgcgctccggggagatcaaggccatcgccgccgagagcgaccgcaacaagcgctgcgtcgaggccacgcccggcgccgtcgagttcctcgtctccgtcgtcgtccagagccatgccgccgcctccacctcagccagctcggacgacgacgacctgttcgactcggtgatcgattcccccatgtcgacgagctcgccggaggaggaggccctgggcgtgctctactccctcaagccgtccgagcccaccctgcgccgcgtcctcggcaaggacaatggcgtcggcttcctcgacaccctcgcctccgtgctccgccgcccgagctaccgttcgcgcgcgtatgccatcctcctcctgaaggcggtgacgtcggcgatgccgccggagcggctgatggcggtgagccccgagctggtggaggaggtggtccgggtggtgtccgacggcgtgtcgtcgaaggcggtgaaggcggcgctgcacgtgctgtgccggctgtgcccgtgggggcggaaccgcgtgaaggcggtggaggccggcgcggtggcggcgctggtggagctcctcctcgacgaggagggcggcggcgggcggcggcgcgcggcggagctggcggtggtggcgatcgaccacctgtgcgggtgcgcggaggggaggtcggagctggtggcgcacccggcggggctcgccgtggtgtccaagagggcgatgcgggtgtcgccggcggccaccgagagcgccgtgcgcgcgctccacgccgtcgcgaggaacgcggcgacgccggccgtgctgcaggagatgctcgccgtcggcgtggtggcgaagctgctgctggtgctgcaggcggacggcggcgagcgcgccagggcgagggcgagggagatgctcagggcgaacgctagggtttggaaggactcgccatgcttgcaagctcaccttaaggcttcttacccctcctga

SEQ ID NO: 98 - protein, 415 aa, Oryza sativa
MEEAAAEVPSYFLCPISLEIMRDPVTLATGITYDRSSIERWMFGGGGGGGGKGTCPVTRRQLAPAEREATPNHTLRRLIQAWGRRRCSAAAAGSGSSPRSGEIKAIAAESDRNKRCVEATPGAVEFLVSVVVQSHAAASTSASSDDDDLFDSVIDSPMSTSSPEEEALGVLYSLKPSEPTLRRVLGKDNGVGFLDTLASVLRRPSYRSRAYAILLLKAVTSAMPPERLMAVSPELVEEVVRVVSDGVSSKAVKAALHVLCRLCPWGRNRVKAVEAGAVAALVELLLDEEGGGGRRRAAELAVVAIDHLCGCAEGRSELVAHPAGLAVVSKRAMRVSPAATESAVRALHAVARNAATPAVLQEMLAVGVVAKLLLVLQADGGERARARAREMLRANARVWKDSPCLQAHLKASYPS

SEQ ID NO: 99 - DNA, 1215 bp, Oryza sativa
atggcgagcgcggcggccgaggtgccgtcctacttcgtctgcccgatctcgctgcagctcatgcgcgaccccgtcacgctccctacggggatctcgtacgaccgcgccgcgatcgcgcggtggctcgccgcgccgggggcccgccggacgtgtcccgtcacgcggcagccgctcgagcacgggctggagctcacgcccaaccacaccctgcgccgcctgatccagtcgtgggcggcctccgtctcccccgggtcggccgtggacgaggaggtggccgcgctacgaccggtttcgagcgacgaggttgcgtcgctcctgtccgacgccgccgcggcgcaggtgggcgcgctcaggaggctgcgggagctggcggcggagtgcgaggatagcagggcaatgctggagtcccagggcggggtgttcgacgtgctatctcgcgtcgtgaccagcggcagcgcctgctcgacggcgcgggaggaggcggttggtgtcctcgcgtcgctccggatcccggagcaggagctgatcggcgtctcgaccaggcacggcaacctggcggagtccctcacggccgtgctccgctcgtcgaatctccagtcgcgggcgcacgcggtgcagctcgtgaggacgctcgccgacgcggtggtcccggcgtgggtgatcggcctcaacgcggagctcctcgccgaggtggtcggcgtggtccgcgaccgcgtctcggcgcgggccaccaaggcgtccctccacgcgctcgccgcgctctgcccgtacggccggcaccgcgtgaagatcgtgggcgccggcgcggtggcggcgctggtggagctgctgctggacgagcccgagcggcgcgtgtgcgagctggcgctggccgtgctggaccggctgtgcacgtgcgcggaggggcgcgcggagctggtggcgcacgcggcgggcgtggccgtggtggggaagaaggtgctgcgggtgtcggaggcggcgagcgagcgggcggtgcgcgtgctgcggtcggtggcgcggcacgcggcgacgccggcggtgctgcaggagatggcgcagtgcggcgtggtggggaagctgtgcctggcgctgcggtcggagcagtgcggggtgaagaccaaggagaaggcgcacgaggtgctcaagctgcactccagggtctggagggcctcgccatgcttgtctcccagcttcttggcgctttacccatcatga

SEQ ID NO: 100 - protein, 404 aa, Oryza sativa
MASAAAEVPSYFVCPISLQLMRDPVTLPTGISYDRAAIARWLAAPGARRTCPVTRQPLEHGLELTPNHTLRRLIQSWAASVSPGSAVDEEVAALRPVSSDEVASLLSDAAAAQVGALRRLRELAAECEDSRAMLESQGGVFDVLSRVVTSGSACSTAREEAVGVLASLRIPEQELIGVSTRHGNLAESLTAVLRSSNLQSRAHAVQLVRTLADAVVPAWVIGLNAELLAEVVGVVRDRVSARATKASLHALAALCPYGRHRVKIVGAGAVAALVELLLDEPERRVCELALAVLDRLCTCAEGRAELVAHAAGVAVVGKKVLRVSEAASERAVRVLRSVARHAATPAVLQEMAQCGVVGKLCLALRSEQCGVKTKEKAHEVLKLHSRVWRASPCLSPSFLALYPS

SEQ ID NO: 101 - DNA, 1416 bp, Oryza sativa
cccacgcgtccgcccacgcgtccgggacaccagaaacatagtacacttgagctcactccaaactcaaacactcacaccaatggctctccaagttcaggccgcactcctgccctctgctctctctgtccccaagaagggtaacttgagcgcggtggtgaaggagccggggttccttagcgtgagcagaaggccaagaagccgtcgctggtggtgagggcggtggcgacgcggcgggccggtggcgagccccggcgcgggcacgtcgaaggcggacgggaagaagacgctgcggcagggggtggtggtgatcaccggcgcgtcgtcggggctcgggctcgcggcggcgaaggcgcttggcggagacggggaagtggcacgtggtgatggcgttccgcgactttcctgaaggcggcgacggcggcgaaggcggcggggatggcggcggggagctacaccgtcatgcacctggacctcgcctccctcgacagcgtccgccagttcgtggacaacttccggcgctccggcatgccgctcgacgcgctggtgtgcaacgccgcacatctaccggccgacggcgcggcaaccgacgttcaacgccgacgggtacgagatgagcgtcggggtgaaccacctgggccacttcctcctcgcccgcctcatgctcgacgacctcaagaaatccgactacccgtcgcggcggctcatcatcctcggctccatcaccggcaacaccaacaccttcgccggcaacgtccctcccaaggccgggctaggcgacctccgggggctcgccggcgggctccgcgggcagaacgggtcggcgatgatcgacggcgcggagagcttcgacggcgccaaggcgtacaaggacagcaagatctgtaacatgctgacgatgcaggagttccaccggagattccacgaggagaccgggatcacgttcgcgtcgctgtacccggggtgcatcgcgacgacgggcttgttccgcgagcacatcccgctgttccggctgctgttcccgccgttccagcggttcgtgacgaaggggttcgtgtcggaggcggagtccgggaagcggctggcgcaggtggtgggcgacccgagcctgaccaagtccggcgtgtactggagctggaacaaggactcggcgtcgttcgagaaccagctctcgcaggaggccagcgacccggagaaggccaggaagctctgggacctcagcgagaagctcgtcggcctcgtctgagtttattatttacccattcgtttcaactgttaatttcttcggggtttagggggtttcagctttcagtgagagaggcctgtcaagtgatgtacaattagtaatttttttttacccgacaaatcatgcaataaaaccacaggcttacattatcgatttgtccacctaaattaagt

SEQ ID NO: 102 - DNA, 55 bp, Artificial sequence
  primer: prm9075
ggggacaagtttgtacaaaaaagcaggcttaaacaatggaagaaattcaagtacc

SEQ ID NO: 103 - DNA, 51 bp, Artificial sequence
  primer: prm8785
ggggaccactttgtacaagaaagctgggtgctcttttggtcctattttcct

SEQ ID NO: 104 - DNA, 801 bp, Pseudomonas fluorescens
tttgtacaaaaaagcaggcttaaacaatgactgacaccccaatgtcccccgccgaattcgaagcggccctgcgcgccaagggcgcctattaccacatctatcacccgtatcacgtggcgatgtatgaaggccgggcgactcgcgagcagatccagggctgggtcgccaaccgcttttactatcaggtgaacatcccgctcaaggacgccgcgatcctggccaactgcccggaccgcgaaatccgtcgcgagtggattcaacgcctgttggaccatgacggcgcccccggtgaagacggcggtatcgaagcctggttgcgtcttgggcaagcggtcggcctcgacccggatcagttgcgctcccaggaactggtgctgcccggcgtgcgtttcgccgtggatgcctacgtcaacttcgcccgccgggcccgttggcaggaagccgccagcagctcattgaccgagctgtttgcgccgcagatccaccaatcgcgcctcgacagttggccgcagcattacccgtggatcgacccggccggttacgaatatttccgtacgcgcctgggccaggctcgccgggatgtggagcacggtctggcaatcacgttgcagcactacaccacgcgggaaggccaggagcgcatgctggaaattctccagttcaaactggacattctttggagcatgctcgacgccatgagcatggcctacgaactgaaccgcccgccgtaccacagcgtgaccgaacagcgggtctggcataaaggaatcaccttatgaacccagctttcttgtacaaagt

SEQ ID NO: 105 - protein, 250 aa, Pseudomonas fluorescens
MTDTPMSPAEFEAALRAKGAYYHIYHPYHVAMYEGRATREQIQGWVANRFYYQVNIPLKDAAILANCPDREIRREWIQRLLDHDGAPGEDGGIEAWLRLGQAVGLDPDQLRSQELVLPGVRFAVDAYVNFARRARWQEAASSSLTELFAPQIHQSRLDSWPQHYPWIDPAGYEYFRTRLGQARRDVEHGLAITLQHYTTREGQERMLEILQFKLDILWSMLDAMSMAYELNRPPYHSVTEQRVWHKGITL

SEQ ID NO: 106 - DNA, 753 bp, Pseudomonas fluorescens
atgaccgacaccccgctgtcccccgccgaattcgaagcggccctgcgcgccaagggcgcctattaccacattcatcacccgtatcacgtggcgatgtatgaaggccgggccacccgtgagcagatacagggctgggtcgccaaccgcttctactatcaggtgaacatccccctgaaagacgcggcgatcctcgccaactgcccggatcgcgagatccgtcgcgagtggattcagcgcctgctcgaccacgacggcgcgcccggtgaagatggcggcatcgaagcctggctgcgcctcggccaggccgtcggtctcgatccggatcaattgcgctcccaggaactggtgctgcccggcgtgcgtttcgccgtcgacgcctacgtcaacttcgcccgccgcgccagttggcaggaagccgccagcagctcgctgaccgagctgttcgcgccgcagatccaccagtcgcgcctcgacagctggccgcagcattacccgtggatcgacccggccggctacgaatatttccgcacccgtctcggccaggcccggcgcgatgtcgagcatggtctggcgatcacgctggagcactacaagacccgcgaaggccaggaacgcatgctggaaattctccagttcaaactggacatcctttggagcatgctcgatgccatgagcatggcctacgaactgaaccgcccgccgtatcacagcgtcaccgatcaacgggtctggcataaaggaatcgccttatga

SEQ ID NO: 107 - protein, 250 aa, Pseudomonas fluorescens
MTDTPLSPAEFEAALRAKGAYYHIHHPYHVAMYEGRATREQIQGWVANRFYYQVNIPLKDAAILANCPDREIRREWIQRLLDHDGAPGEDGGIEAWLRLGQAVGLDPDQLRSQELVLPGVRFAVDAYVNFARRASWQEAASSSLTELFAPQIHQSRLDSWPQHYPWIDPAGYEYFRTRLGQARRDVEHGLAITLEHYKTREGQERMLEILQFKLDILWSMLDAMSMAYELNRPPYHSVTDQRVWHKGIAL

SEQ ID NO: 108 - DNA, 753 bp, Pseudomonas fluorescens
atgaccgacaccccgctgtccgccgccgaattcgagcaggcactgcgcgccaaaggcgcctactaccacatccatcacccttatcacgtggcgatgtatgaaggccgggcgacccgcgagcagatccagggctgggtcgccaaccggttctattaccaggtgaacatccccatgaaggacgcggcgatcctcgccaactgtccggaccgggagattcgccgcgaatggatccagcgcctgctggaccatgacggcgccccgggcgaggacggcggcatcgaggcctggctgcgcctgggccaggccgtgggcctggacccggaccagttgcgctcccaggaactggtgctgcccggtgtgcgctttgccgtggacgcctatgtcaattttgctcgccgggccagttggcaggaggcggccagcagctcgctgaccgaactgttcgcgccgcaaatccaccagtcgcgcctggacagctggccccagcattacccatggatcgaccccactggctacgagtacttccgcacccgcctgggccaggcccgccgtgatgtcgagcacggcctggcgatcaccctgcagcactacaccacccgtgccggccaggaacgcatgctggaaattctccagttcaaactggacatcctttggagcatgctcgacgccatgagcatggcctatgaactgaaccgcccgccctatcacagcgtcaccgatcagcgggtctggcataaggggatcaccctatga

SEQ ID NO: 109 - protein, 250 aa, Pseudomonas fluorescens
MTDTPLSAAEFEQALRAKGAYYHIHHPYHVAMYEGRATREQIQGWVANRFYYQVNIPMKDAAILANCPDREIRREWIQRLLDHDGAPGEDGGIEAWLRLGQAVGLDPDQLRSQELVLPGVRFAVDAYVNFARRASWQEAASSSLTELFAPQIHQSRLDSWPQHYPWIDPTGYEYFRTRLGQARRDVEHGLAITLQHYTTRAGQERMLEILQFKLDILWSMLDAMSMAYELNRPPYHSVTDQRVWHKGITL

SEQ ID NO: 110 - DNA, 756 bp, Pseudomonas syringae
atgagcgaagcgactgcgctgtcccccgccgaattcgaacaggccttgcgcgccaagggtgcctattaccacatctatcacccgttccatgtggcgatgtacgagggccgagcgacccgcgagcagattcagggctgggtcgccaaccgtttctactatcaggtgaacattccgctcaaggacgcggcgattctggccaactgcccggatcgcgagatccgtcgcgagtggattcagcgcctgctcgatcatgacggtgcgcccggcgaagacggcggcatcgaagcctggctgcgcctcggccaggccgtgggactggacccggaccagctgcgctcgcaggaactggtgctgccaggcgtgcgctttgccgtcgacgcctacgtgaacttcgcccgccgcgccaactggcaggaagcagccagcagctcgctgaccgaactgttcgccccgcagatccaccagtcgcgtctggacagctggccgcagcactacccatggatcgacccggcaggctatgagtatttccgcactcgcctgggtcaggcccgacgcgatgtagagcacggcctcgccatcacgttacagcactacactacgtacgaaggtcagcagcgtatgctggaaatcctgcagttcaaactcgatatcctgtggagcatgctcgatgcgatgtccatggcctacgagctgaaccgcccgccgtatcacagcgtcacagaccaaagggtctggcataaggggattaccctatga

SEQ ID NO: 111 - protein, 251 aa, Pseudomonas syringae
MSEATALSPAEFEQALRAKGAYYHIYHPFHVAMYEGRATREQIQGWVANRFYYQVNIPLKDAAILANCPDREIRREWIQRLLDHDGAPGEDGGIEAWLRLGQAVGLDPDQLRSQELVLPGVRFAVDAYVNFARRANWQEAASSSLTELFAPQIHQSRLDSWPQHYPWIDPAGYEYFRTRLGQARRDVEHGLAITLQHYTTYEGQQRMLEILQFKLDILWSMLDAMSMAYELNRPPYHSVTDQRVWHKGITL

SEQ ID NO: 112 - DNA, 756 bp, Pseudomonas syringae
atgagcgaagcgactgcgctgtcccccgccgaattcgaacaggccttgcgcgccaagggtgcctattaccacatctatcacccgtaccatgtggcgatgtacgagggtcgtgcaacccgcgagcagattcagggctgggtcgccaaccgtttctactatcaggtgaacattccgctcaaggacgcggcgattctggccaactgcccggatcgcgagatccgtcgcgagtggattcagcgcctgctcgatcatgacggtgcgcccggcgaagacggcggcattgaagcctggctgcgcctcggccaggccgtggggctcgacccggaccaactgcgctctcaggaactggtgctgccaggcgtgcgttttgccgtcgacgcctacgtgaacttcgcccgccgcgccaactggcaggaagcggccagcagctcgctgaccgaactgttcgcgccgcagatccaccaatcgcgcctggacagctggccgcagcattacccgtggatcgacccggcaggctacgagtatttccgcactcgcctgggccaggcccgacgcgacgtggaacacggcctcgccatcacgttacagcactacactacatatgaaggccagcagcgcatgctggaaatcctgcagttcaagctcgatatcctgtggagcatgctcgatgcgatgtccatggcctacgagctgaaccgcccgccgtatcacagcgttacagaccaaaaggtctggcataaggggattacgctatga

SEQ ID NO: 113 - protein, 251 aa, Pseudomonas syringae
MSEATALSPAEFEQALRAKGAYYHIYHPYHVAMYEGRATREQIQGWVANRFYYQVNIPLKDAAILANCPDREIRREWIQRLLDHDGAPGEDGGIEAWLRLGQAVGLDPDQLRSQELVLPGVRFAVDAYVNFARRANWQEAASSSLTELFAPQIHQSRLDSWPQHYPWIDPAGYEYFRTRLGQARRDVEHGLAITLQHYTTYEGQQRMLEILQFKLDILWSMLDAMSMAYELNRPPYHSVTDQKVWHKGITL

SEQ ID NO: 114 - DNA, 756 bp, Pseudomonas putida
tcatagggtgattcccttgtgccacacccgttcctgggtgacggagtgatagggcgggcggttcagttcgtaggccatgctcatggcatcgagcatactccagaggatatccagcttgaactgcagtatctccagcatacgctcctggcccgcacgggtggtgtagtgctgcagggtaatcgccaggccgtgttccacatcgcgtcgcgcctggcccaggcgggtacggaaatactcatagccggcggggtcgatccacgggtagtgctgcggccagctgtccaggcgtgactggtggatttgcggggcgaacagctcggtcagcgaactgctggcggcttcctgccagctggcgcggcgggcaaagttgacgtaggcgtccacggcaaagcgcacgccaggcaataccagttcttgcgagcgcaattggtccgggtccagcccgacagcctggcccaggcgcagccaggcttcgatgccgccatcctcgccgggcgcaccgtcgtggtcgagcaggcgctggatccactcgcggcgcacttcgcggtccgggcagttggccaggatcgcggcatccttcatcgggatgttgacctggtagtagaagcggttggccacccagccctggatctgctcgcgggtggcgcgcccctggtacatcgccacgtggtacgggtgatggatgtggtaataggcgcccttggcgcgcagggcctgctcgaactcggcaggggacattggcagtgcgtcgctcat

SEQ ID NO: 115 - protein, 251 aa, Pseudomonas putida
MSDALPMSPAEFEQALRAKGAYYHIHHPYHVAMYQGRATREQIQGWVANRFYYQVNIPMKDAAILANCPDREVRREWIQRLLDHDGAPGEDGGIEAWLRLGQAVGLDPDQLRSQELVLPGVRFAVDAYVNFARRASWQEAASSSLTELFAPQIHQSRLDSWPQHYPWIDPAGYEYFRTRLGQARRDVEHGLAITLQHYTTRAGQERMLEILQFKLDILWSMLDAMSMAYELNRPPYHSVTQERVWHKGITL

SEQ ID NO: 116 - DNA, 756 bp, Pseudomonas putida
atgagcgacgcactgcccatgtcccctgccgaattcgagcaggctctgcgcgccaaaggcgcctattaccacatccatcacccgtaccatgtggcgatgtaccaaggccgcgccacccgcgagcagatccagggctgggtggccaaccgtttctactaccaggtcaacatcccgatgaaggatgccgcgatcctggccaactgcccggaccgcgaagtgcgccgagagtggatccagcgcctgctcgaccacgacggcgcacccggcgaggacggtggcatcgaagcctggctgcgcctgggccaggccgtcggcctcgaccccgaccagctgcgctcccaggagctggtactgcccggcgtacgctttgccgtggacgcctacgtcaacttcgcccgccgcgccagctggcaggaagccgccagcagctcgctgaccgaactgtttgccccacaaatccaccagtcgcggctggacagttggccacagcactacccgtggatcgacccggccggctacgagtacttccgcacccgccttggccaggcccggcgcgacgtggagcacggcctggcgattaccctgcagcactacaccacccgcgcgggccaggagcgtatgctggagatcctgcagttcaagctggatatcctctggagcatgctcgacgccatgagcatggcctacgagctgaaccgcccgccttatcactccgtcacccaggaccgggtgtggcacaaggggatcaccctatga

SEQ ID NO: 117 - protein, 251 aa, Pseudomonas putida
MSDALPMSPAEFEQALRAKGAYYHIHHPYHVAMYQGRATREQIQGWVANRFYYQVNIPMKDAAILANCPDREVRREWIQRLLDHDGAPGEDGGIEAWLRLGQAVGLDPDQLRSQELVLPGVRFAVDAYVNFARRASWQEAASSSLTELFAPQIHQSRLDSWPQHYPWIDPAGYEYFRTRLGQARRDVEHGLAITLQHYTTRAGQERMLEILQFKLDILWSMLDAMSMAYELNRPPYHSVTQDRVWHKGITL

SEQ ID NO: 118 - DNA, 756 bp, Pseudomonas putida; identical to SEQ ID NO: 116

SEQ ID NO: 119 - protein, 251 aa, Pseudomonas putida
MSDALPMSPAEFEQALRAKGAYYHIHHPYHVAMYQGRATREQIQGWVANRFYYQVNIPMKDAAILANCPDREVRREWIQRLLDHDGAPGEDGGIEAWLRLGQAVGLDPDQLRSQELVLPGVRFAVDAYVNFARRASWQEAASSSLTELFAPQIHQSRLDSWPQHYPWIDPAGYEYFRTRLGQARRDVEHGLAITLQHYTTRAGQERMLEILQFKLDILWSMLDAMSMAYELNRPPYHSVTQERMWHKGITL

SEQ ID NO: 120 - DNA, 756 bp, Pseudomonas syringae
tcatggcgtaatccccttatgccagaccttctggtctgtgacgctgtggtacggggggcggttcaattcatacgccatggacatggcatcgagcatgctccacagaatgtcgagtttgaactgcaggatttccagcatgcgctgctggccttcatacgtagtgtagtgctgtaacgtgattgcgaggccgtgttccacatcgcgacgtgcctgacccaggcgagtacggaaatactcgtaacctgtggggtcaatccacgggtaatgctgtggccagctgtccaggcgcgattgatgaatctgcggtgcgaacaactcggtcagcgagctgctggcggcctcttgccagttggcgcggcgggcgaagttcacgtaggcatcgaccgcaaagcgcacaccgggcagtaccagttcctgcgagcgcaactgatccgggtccagccccacggcctcgccgaggcgcagccaggcttcgatgccgccgtcttcaccgggcgcgccgtcgtggtccagcaggcgctgaatccactcgcgacgaatctcgcgatccgggcaattggccagaatggcggcgtccttgagcgggatgttcacctgatagtaaaagcggttggcgacccagccctgaatctgctcgcgggtcgcgcggccttcatacatcgccacatgaaacggatgatagatgtggtaataggcgcccttggcacgtaaggcctgctcgaattcagccggggacagcgcagtcgcttcactcat

SEQ ID NO: 121 - protein, 251 aa, Pseudomonas syringae
MSEATALSPAEFEQALRAKGAYYHIYHPFHVAMYEGRATREQIQGWVANRFYYQVNIPLKDAAILANCPDREIRREWIQRLLDHDGAPGEDGGIEAWLRLGEAVGLDPDQLRSQELVLPGVRFAVDAYVNFARRANWQEAASSSLTELFAPQIHQSRLDSWPQHYPWIDPTGYEYFRTRLGQARRDVEHGLAITLQHYTTYEGQQRMLEILQFKLDILWSMLDAMSMAYELNRPPYHSVTDQKVWHKGITP

SEQ ID NO: 122 - DNA, 756 bp, Pseudomonas entomophila
tcataaggcgattcccttgtgccagacccgctcgcttgtgacgctgtgatagggcgggcggttcaattcgtaggccatgctcatggcatcgagcatgctccagaggatatccagcttgaactgcaggatctccagcatgcgcgcctggccctcgcgggtggtgtagtgcgccagggtgatcgccaggccatgctcgacatcacggcgggcctggcccaggcgggtgcggaagtattcgtagccggccgggtcgatccacgggtagtgctgcggccagctgtccaggcgcgactggtggatctgcggggcgaacagctcggtcagcgagctgctggcggcctcctgccagctggcgcggcgggcgaagttgacgtaggcgtcgacggcgaagcgcacgccgggcagcaccagctcctggctgcgcagttggtccgggtccaggcccacggcctggccgagacgcagccaggcttcgatgccgccgtcctcgcccggcgcgccgtcatggtcgagcaggcgctggacccactcgcggcgcacctcgcggtccgggcagttggccaggatcgcggcatccttcatggggatgttcacctggtagtagaagcggttggccacccagccctggatctgctcgcgggtggcgcggccttcatacatcgccacgtggtaggggtggtggatgtggtagaaggcgcccttggcgcgcagggcctgctcgaactcggcaggtgacatcggtgcggcgtcattcat

SEQ ID NO: 123 - protein, 251 aa, Pseudomonas entomophila
MNDAAPMSPAEFEQALRAKGAFYHIHHPYHVAMYEGRATREQIQGWVANRFYYQVNIPMKDAAILANCPDREVRREWVQRLLDHDGAPGEDGGIEAWLRLGQAVGLDPDQLRSQELVLPGVRFAVDAYVNFARRASWQEAASSSLTELFAPQIHQSRLDSWPQHYPWIDPAGYEYFRTRLGQARRDVEHGLAITLAHYTTREGQARMLEILQFKLDILWSMLDAMSMAYELNRPPYHSVTSERVWHKGIAL

SEQ ID NO: 124 - DNA, 756 bp, Pseudomonas putida
atgagcgaggcactgccactgtcgcctgccgaattcgagcaggccctgcgcgccaagggcgcctactaccacattcatcacccctaccacgtggcgatgtacgaagggcgcgccacccgcgaacagattcagggctgggtggccaaccgcttctattaccaggtgaacatcccgatgaaggatgccgcgatcctggccaactgcccggaccgcgaagtgcgccgtgagtggatccagcgcctgctcgaccacgacggagccccgggcgaagacggtggtatcgaagcctggctgcgcctgggccaggccgtggggctcgacccggaccagctgcgttcccaggagctggtgctgccaggtgtacgcttcgccgtcgatgcctacgtgaacttcgcccgccgtgccagctggcaggaagcggccagcagctcgctgaccgaactgttcgccccgcagatccaccagtcgcgcctggacagctggccgcaacactatccgtggatcgatcctgccggctacgagtacttccgcacccgcctgggccaggcccggcgcgatgtcgaacacggtctgacgatcacattgcagcactacaccacccgggcggcccaggagcgtatgctggaaatcctgcagttcaagctggatatcctctggagcatgctcgatgccatgagcatggcctacgagctgcaccgcccgccgtatcacaccgtcacccagcaacgggtatggcacaaggggattgccctatga

SEQ ID NO: 125 - protein, 251 aa, Pseudomonas putida
MSEALPLSPAEFEQALRAKGAYYHIHHPYHVAMYEGRATREQIQGWVANRFYYQVNIPMKDAAILANCPDREVRREWIQRLLDHDGAPGEDGGIEAWLRLGQAVGLDPDQLRSQELVLPGVRFAVDAYVNFARRASWQEAASSSLTELFAPQIHQSRLDSWPQHYPWIDPAGYEYFRTRLGQARRDVEHGLTITLQHYTTRAAQERMLEILQFKLDILWSMLDAMSMAYELHRPPYHTVTQQRVWHKGIAL

SEQ ID NO: 126 - DNA, 753 bp, Pseudomonas mendocina
atgagccaagctgccatgacacctgccgagttcgagcaggcgctgcgcgccaagggcgcgctgtaccacatccatcatccgtttcatcgcgccatgtacgaagggcgcgccacccgcgagcagattcagggctgggtggccaaccgcttctactatcaggtcaatattccgctcaaggatgcggcgatcctcgccaactgtccggatcgcgaaactcggcgcgagtggattcagcgcatcctcgaccatgacggtgcaccgggtgaggagggcggtatcgaagcctggctgcgcctggccgagtcggtcggcctcgaccgcgagcaggtgctgtcgcaggagctggtgctgcccggcgtgcgcttcgccgtcgacgcctacgtcaacttcgcccgccgcgccagctggcaggaagcggccagcagctcgctgaccgagctgttcgcgccgaccatccaccagtcgcgcctggacgcctggccgcagcactacccgtggatcgatgcggccggttacgactacttccgcaatcgtctgagccaggcgcggcgcgacgtcgagcatggcctgcgcatcaccctggagcactaccgcacccgtgatgcgcaggagcacatgctgaacatcctgcagttcaagctggacgtgctgtggagcatgctcgacgccatgagcatggcctacgagctggagcgcccgccgtatcacacggtgacggccgagcgtgtctggcataagggaatcgacctgtga

SEQ ID NO: 127 - protein, 250 aa, Pseudomonas mendocina
MSQAAMTPAEFEQALRAKGALYHIHHPFHRAMYEGRATREQIQGWVANRFYYQVNIPLKDAAILANCPDRETRREWIQRILDHDGAPGEEGGIEAWLRLAESVGLDREQVLSQELVLPGVRFAVDAYVNFARRASWQEAASSSLTELFAPTIHQSRLDAWPQHYPWIDAAGYDYFRNRLSQARRDVEHGLRITLEHYRTRDAQEHMLNILQFKLDVLWSMLDAMSMAYELERPPYHTVTAERVWHKGIDL

SEQ ID NO: 128 - DNA, 813 bp, Pseudomonas aeruginosa
tcatggcgccagcccccggtgccagacccgctcacgggtcaccgtatggtacggcggacgttccagctcgtaggccatgctcatcgcgtcgagcatgctccacagcacgtccagcttgaattgcaggatctccagcatgcgttcctgtgcctcgcgggtccgatagtgctccagggtgatccgcaggccgtgctcgacgtcacgccgggcctgggccaggcggctgcggaaatactcgtagccggccgcctcgatccacggatagtggcgcggccagctgtccagccgcgactggtggatctgcggggcgaagagttcggtcagcgaactgctcgccgcctcctgccagctggcgcgacgggcgaagttgacataggcgtcgacggcgaagcgcacgccgggcagcacccgttcttcggacagcacctgctcgcgctccaggcccaccgcctccgccaggcgcagccaggcctcgatgcctcccgcctcgccgggggcgccgtcgtggtcgaggatgcgctggacccactcgcggcggacctcgcggtcgggacagttggccaggatcgccgcgtccttcagcgggatgttgagctggtagtagaagcggttcgccacccagccctggatctgttcgcgactggcacggccctcgtacatcgcgacatggaacggatggtggatatggtagtagcgccccttgtcgcgcagcgcccgttcgaactcggcgcggtccatggcggcacggctcatgtcggtccccctacagctggatgtgcatgccatcccaggccacttcgatgccactggcat

SEQ ID NO: 129 - protein, 270 aa, Pseudomonas aeruginosa
MPVASKWPGMACTSSCRGTDMSRAAMDRAEFERALRDKGRYYHIHHPFHVAMYEGRASREQIQGWVANRFYYQLNIPLKDAAILANCPDREVRREWVQRILDHDGAPGEAGGIEAWLRLAEAVGLEREQVLSEERVLPGVRFAVDAYVNFARRASWQEAASSSLTELFAPQIHQSRLDSWPRHYPWIEAAGYEYFRSRLAQARRDVEHGLRITLEHYRTREAQERMLEILQFKLDVLWSMLDAMSMAYELERPPYHTVTRERVWHRGLAP

SEQ ID NO: 130 - DNA, 753 bp, Pseudomonas aeruginosa
atgagccgtgccgccatggatcgcgccgaattcgaacgggcgctgcgcgacaagggacgctactaccatatccaccatccgttccatgtcgcgatgtacgagggccgtgccagtcgcgaacagatccagggctgggtggcgaaccgtttctactaccaggtcaacatcccgctgaaggacgcggcgatcctggccaactgtcccgaccgcgaggtccgccgcgagtggatccagcgtatcctcgaccacgacggcgcccccggcgaggcgggcggcatcgaggcctggctgcgtctggcggaagcggtgggcctggagcgcgagcaggtgctgtccgaggagcgggtgctgcccggcgtgcgcttcgccgtcgacgcctacgtcaacttcgcccgtcgcgccagttggcaggaggcggcgagcagttcgctgaccgaactcttcgccccgcagatccaccagtcgcggctggacagctggccgcgccactatccgtggatcgaggcggccggctacgagtatttccgcagtcgcctggcccaggcccggcgcgacgtcgagcacggcctgcggatcaccctggagcactatcggacccgcgaggcacaggaacgcatgctggatatcctgcaattcaagctggacgtgttgtggagcatgctcgacgcgatgagcatggcctacgaactcgaacgcccgccgtaccacacggtgacccgcgagcgggtctggcatcgggggctggcatcatga

SEQ ID NO: 131 - protein, 250 aa, Pseudomonas aeruginosa
MSRAAMDRAEFERALRDKGRYYHIHHPFHVAMYEGRASREQIQGWVANRFYYQVNIPLKDAAILANCPDREVRREWIQRILDHDGAPGEAGGIEAWLRLAEAVGLEREQVLSEERVLPGVRFAVDAYVNFARRASWQEAASSSLTELFAPQIHQSRLDSWPRHYPWIEAAGYEYFRSRLAQARRDVEHGLRITLEHYRTREAQERMLDILQFKLDVLWSMLDAMSMAYELERPPYHTVTRERVWHRGLAS

SEQ ID NO: 132 - DNA, 753 bp, Pseudomonas aeruginosa
tcatggcgccagcccccggtgccagacccgctcacgggtcaccgtatggtacggcggacgttccagctcgtaggccatgctcatcgcgtcgagcatgctccacagcacgtccagcttgaattgcaggatctccagcatgcgttcctgtgcctcgcgggtccgatagtgctccagggtgatccgcaggccgtgctcgacgtcacgccgggcctgggccaggcggctgcggaaatactcgtagccggccgcctcgatccacggatagtggcgcggccagctgtccagccgcgactggtggatctgcggggcgaagagttcggtcagcgaactgctcgccgcctcctgccagctggcgcgacgggcgaagttgacataggcgtcgacggcgaagcgcacgccgggcagcacccgttcttcggacagcacctgctcgcgctccaggcccaccgcctccgccaggcgcagccaggcctcgatgcctcccgcctcgccgggggcgccgtcgtggtcgaggatgcgctggacccactcgcggcggacctcgcggtcgggacagttggccaggatcgccgcgtccttcagcgggatgttgagctggtagtagaagcggttcgccacccagccctggatctgttcgcgactggcacggccctcgtacatcgcgacatggaacggatggtggatatggtagtagcgccccttgtcgcgcagcgcccgttcgaactcggcgcggtccatggcggcacggctcat

SEQ ID NO: 133 - protein, 250 aa, Pseudomonas aeruginosa
MSRAAMDRAEFERALRDKGRYYHIHHPFHVAMYEGRASREQIQGWVANRFYYQLNIPLKDAAILANCPDREVRREWVQRILDHDGAPGEAGGIEAWLRLAEAVGLEREQVLSEERVLPGVRFAVDAYVNFARRASWQEAASSSLTELFAPQIHQSRLDSWPRHYPWIEAAGYEYFRSRLAQARRDVEHGLRITLEHYRTREAQERMLEILQFKLDVLWSMLDAMSMAYELERPPYHTVTRERVWHRGLAP

SEQ ID NO: 134 - DNA, 753 bp, Azotobacter vinelandii
tcacagtatcgttccccggtgccagacccgctcatgggtcaccgtgtgatacggcggacggtccagttcgtaggccatgctcatggcgtcgagcatgctccagaggatgtccagcttgaactgcaggatctccagcatgcgggcctgggcctcgcgggtggcgaagtgcgcgagggtgatgcgcaggccgtgctcgacgtcgcggcgcgcttccttcaggcgcctgcggaagtagtcgtagccgccggcctcgatccaggggtagtgccgcggccaggtgtccaggcgcgactggtggatggtcggggcgaacagttcggtcagcgagctgccggccgcctcctgccaactggcgcggcgggcgaagttgacgtaggcgtccaccgcgaaacgcacccccggcagcaccagttcctgggacagcaattgctcgcgatcgaggccgaccgcctcgccgaggcgcagccaggcctcgatgccgccctcctcgccggggccgccatcgtggtcgaggatgcgctggacccactcgcggcggacttcgcggtccgggcagttggcgaggatcgccgcgtccttcaggggaatgttcacctggtagtagaagcgattggccacccagccccggatctgctcgcgggtcgagcgaccctcgtacatggcgacctggaatggatggtggatgtggtagtaggcgcccttggcgcgcaacgcccgctcgaattcggcgggactcatggctgtctgggtcat

SEQ ID NO: 135 - protein, 250 aa, Azotobacter vinelandii
MTQTAMSPAEFERALRAKGAYYHIHHPFQVAMYEGRSTREQIRGWVANRFYYQVNIPLKDAAILANCPDREVRREWVQRILDHDGGPGEEGGIEAWLRLGEAVGLDREQLLSQELVLPGVRFAVDAYVNFARRASWQEAAGSSLTELFAPTIHQSRLDTWPRHYPWIEAGGYDYFRRRLKEARRDVEHGLRITLAHFATREAQARMLEILQFKLDILWSMLDAMSMAYELDRPPYHTVTHERVWHRGTIL

SEQ ID NO: 136 - DNA, 756 bp, Kluyvera intermedia
atgatcatcactgaagcattatcgcccgccgcgtttgagcaggcgctgcgcgataaaggcgcgttctaccacatacatcacccgtatcacattgccatgcacaatggcgaggcgacgcgcgagcagattcagggctgggtggcgaaccgcttctattatcagaccaacattccgctgaaagatgcggcgatcatggcgaattgcccggatgcggcgacgcggcgtaaatgggtgcagcgcatcctcgatcacgacggcagcaacggtcacgaaggcgggattgaagcctggctgcagttgggtgaggcggtggggctggaacgtgacgtgttgctgtcagagaagctggtgctgccgggcgtgcgttttgcggtggacgcctacgtgaacttcgcgcgccgtgctaactggcaggaagcggcctgtagctcgctcaccgagctgtttgcgccgcagattcatcagtcgcgtctcgacagctggccgcagcactatccgtggatcaaagaggaaggctatttctacttccgcagccgtttgagccaggcgaaccgcgatgtggagcatgggctggcgctggcgcttgaggtgtttacccgcgccgaacagcagaaccgcatgctggagatcctgcagtttaaactcgatattctctggaccatgctcgatgccatgaccatggcgtatgcgctgcaacgtccgccttatcatacggtcaccgatcaggtgtcctggcacagcacaagactggtataa

SEQ ID NO: 137 - protein, 251 aa, Kluyvera intermedia
MIITEALSPAAFEQALRDKGAFYHIHHPYHIAMHNGEATREQIQGWVANRFYYQTNIPLKDAAIMANCPDAATRRKWVQRILDHDGSNGHEGGIEAWLQLGEAVGLERDVLLSEKLVLPGVRFAVDAYVNFARRANWQEAACSSLTELFAPQIHQSRLDSWPQHYPWIKEEGYFYFRSRLSQANRDVEHGLALALEVFTRAEQQNRMLEILQFKLDILWTMLDAMTMAYALQRPPYHTVTDQVSWHSTRLV

SEQ ID NO: 138 - DNA, 771 bp, Oceanospirillum sp.
tcactcattaaacagccccttgtgaaataccttttcacccgtcactgtatggtatggtgggcgctccagttcataggccattgtcattgcatcaagcatggtccaaagcacatccaacttaaactgaagtatttccagcattctgtcttgctgttcccgggtagtgtaatgatccagcgtaatttcaagaccatgaaccacatcacgacgcgcttcggtaagccggttgcggaagtactgataaccctcttctttgatccatgggtaatgctgaggccatgtatcaaggcgattctgatgaatggttggcgcaaacagctcagtcaatgaagagctggcagcttcttgccaggtcgctctgcgcgcaaaattgatataagcatctacagcgaagcgaacaccaggaagaacatgctcacctgataggatctcttcgcgggttagaccgacagcctcaccaagacgaagccatgcttcaataccgccctcggcaccatcataaccatcatgatctaatacacgctgcacccaatgacgacgtacatcccggtcagggcaatttgccataattgcagcatctttcacggggatgcttatctgataatagaaacggtttgcgacccagcctcgaatctgttcaggagtagactggccgttgtacattgcaatatggtaagggtgttgagtgtgataaagatcgcctttcgctctaagcgctttttcaaacgcttcacgactcatgggtaatttatcgttggcctgtgtattcat

SEQ ID NO: 139 - protein, 256 aa, Oceanospirillum sp.
MNTQANDKLPMSREAFEKALRAKGDLYHTQHPYHIAMYNGQSTPEQIRGWVANRFYYQISIPVKDAAIMANCPDRDVRRHWVQRVLDHDGYDGAEGGIEAWLRLGEAVGLTREEILSGEHVLPGVRFAVDAYINFARRATWQEAASSSLTELFAPTIHQNRLDTWPQHYPWIKEEGYQYFRNRLTEARRDVVHGLEITLDHYTTREQQDRMLEILQFKLDVLWTMLDAMTMAYELERPPYHTVTGEKVFHKGLFNE

SEQ ID NO: 140 - DNA, 756 bp, Klebsiella pneumoniae
atgctgatcactgacacgctgtcgccgcaggcctttgaagaggctctgcgggctaaaggcgacttctaccatattcaccacccttaccacatcgccatgcataacggcaacgcgacccgcgagcaaattcagggttgggtggcgaaccggttttattaccagaccactattccgctgaaagacgcggcgattatggccaactgcccggatgcgcagacccggcgcaaatgggtgcagcggatcctcgaccacgacggcagccacggcgaggacggcgggattgaagcctggctgcggctgggggaagcggtcggtttgagccgcgacgatctgctcagcgagcgtcacgtgctgcccggtgtgcgcttcgcggtggatgcctatcttaatttcgcccgtcgcgcctgctggcaggaggcggcctgcagctccctgaccgagctgttcgccccgcagatccatcagtcgcgcctcgacagctggccgcagcactatccatggatcaaagaggaaggctatttttacttccgcagtcgtctgagccaggctaaccgcgacgttgagcatggcctggcgctggcgaaggcctactgcgacagcgctgaaaaacagaaccggatgctggagatcctgcagtttaagctcgacattctgtggtcgatgctcgatgccatgaccatggcctatgccctgcagcgcccgccctatcacacggtcaccgacaaggcggcctggcacacgacccgactggtgtaa

SEQ ID NO: 141 - protein, 251 aa, Klebsiella pneumoniae
MLITDTLSPQAFEEALRAKGDFYHIHHPYHIAMHNGNATREQIQGWVANRFYYQTTIPLKDAAIMANCPDAQTRRKWVQRILDHDGSHGEDGGIEAWLRLGEAVGLSRDDLLSERHVLPGVRFAVDAYLNFARRACWQEAACSSLTELFAPQIHQSRLDSWPQHYPWIKEEGYFYFRSRLSQANRDVEHGLALAKAYCDSAEKQNRMLEILQFKLDILWSMLDAMTMAYALQRPPYHTVTDKAAWHTTRLV

SEQ ID NO: 142 - DNA, 660 bp, Pseudomonas stutzeri
atgtatgccgggcaggcgacgcgcgagcagattcagggttgggttgccaaccgcttctactatcaggtctgcatcccggtgaaggatgcagcgatcatggccaactgtccggaccgcgacacccgccgcgagtggattcagcgcatcatcgaccacgatggcgcgccgggtgaggagggtggcatcgaagcctggctgcgactggccgaggccgtgggtctggaccgcgagcaggtgctgtcgcaggagctggtgcttccgggcgtgcgcttcgcagtggatgcctacgtgaactttgcccgtcgggcctgctggcaggaagcagccagcagctcgctgaccgaactgttcgcaccgaccatccaccagtcgcggctggatagctggccgcagcactatccctggatcgacgcgtcgggctatgactacttccgcaagcgcctgaaggaagcccgccgcgatgtcgagcacggcctgcgcatcaccctggaccactatcgcacccgcgaggcgcaggagcgcatgctggagatccttcagttcaagctcgacgtgttgtggagcatgctggacgccatgagcatggcctatgagctggaccgaccgccgtaccataccgtcacccgcgaccgggtctggcacaagggcatcagcttctga

SEQ ID NO: 143 - protein, 219 aa, Pseudomonas stutzeri
MYAGQATREQIQGWVANRFYYQVCIPVKDAAIMANCPDRDTRREWIQRIIDHDGAPGEEGGIEAWLRLAEAVGLDREQVLSQELVLPGVRFAVDAYVNFARRACWQEAASSSLTELFAPTIHQSRLDSWPQHYPWIDASGYDYFRKRLKEARRDVEHGLRITLDHYRTREAQERMLEILQFKLDVLWSMLDAMSMAYELDRPPYHTVTRDRVWHKGISF

SEQ ID NO: 144 - DNA, 768 bp, Acinetobacter sp.
ttgaggtttaatatgaccacaacattattttctcctgcggaatttgaacaagccctgcgtgacaaaggtcgctactatcatattcatcatccctatcacatcatgatgaatgatgggcatgccactaagcaacaaattcagggctgggtcgccaaccgtttttattatcaggtcaatatccctttaaaagatgcggccatcatggccaattgcccagatcctgcgacacgccgtaaatgggtgcaacgtattttggatcacgatggtcaacatgacgaccatggcggaattgaagcatggttgcgtctgggtgaagccgttggcctagaccgtgagactattttgtcacaaaagatggttttgcccagtgtacgttttgcggtagatgcctatgtcaattttgcccgtcgtgcctgctggcaagaagctgcatgtagttcgcttaccgaactttttgcacctgccatccatcaatcacgtctggatacttggcctacacattacccatggattgatgcagaaggttacgcctattttagaggacgcttgagtcaggccaatcgtgacgttgagcatggtttggaactggcacttgagtactgcaataccgtagatcgccagcagcgtatgttgaatattttacagttcaaactggatattttgtggacgatccttgatggtatgagcatggcctatgtgcttgagcgtgcaccatatcacacggttactcaagaagcggtttggcatcaaaaaggattattaggatga

SEQ ID NO: 145 - protein, 255 aa, Acinetobacter sp.
MRFNMTTTLFSPAEFEQALRDKGRYYHIHHPYHIMMNDGHATKQQIQGWVANRFYYQVNIPLKDAAIMANCPDPATRRKWVQRILDHDGQHDDHGGIEAWLRLGEAVGLDRETILSQKMVLPSVRFAVDAYVNFARRACWQEAACSSLTELFAPAIHQSRLDTWPTHYPWIDAEGYAYFRGRLSQANRDVEHGLELALEYCNTVDRQQRMLNILQFKLDILWTILDGMSMAYVLERAPYHTVTQEAVWHQKGLLG

SEQ ID NO: 146 - protein, 750 aa, Serratia marcescens
ATGACGCAACCACTCCCCCTTGACCCACAGGCGTTTGAAGCGCGCCGTCCACAAGGCGCTTATTACCATATCCACCACCCGTACCACATCGCGATGCACAACGGCGAAGCGACCCGCGAGCAGATCCAGGGCTGGGTGGCCAACCGGTTCTACTACCAGACCAGCATTCCGATTAAGGATGCAGCGATCATGGCCAACTGCCCACAGCCGGAAACACGCCGCAAATGGGTACAGCGCATCCTGGATCACCACGGCACGGACGGCAGCGAAGGCGGCATCGAGGCCTCTGACCTGGGCGAAGCCGTTGGGCTGCAGCGCGACACTTTGCTCTCTGAAGAGCGGGTACTGCCGGGCGTGCGCTTCGCGGTGGACGCCTACGTCAACTTCGCGCGCCGCGCCTGCTGGCAGGAAGCGGCCTGCAGCTCACTGACCGAACTGTTCGCGCCGCAAATTCACCAATCGCGCCTCGACAGCTGGCCGCAGCACTACCCGTGGATCGCAGCCGTCGGCTACGACTATTTCCGCAGCCGCCTCCGCCAGGCCAACCGCGATGTGGAACACGGCCTGGCGCTGGCGCTGGACTATTGCGACACCGTTGAAAAGCAGCAGCGCATGCTGGAGATCCTGCAGTTCAAGCTGGACATTCTGTGGAGCATGCTGGACGCCATGAGCATGGCCTACACCCTGAACCGCCCACCTTACCACAGCGTGACCGCCGCGCGGGTATGGCACAACCAGAGGCTGGTGTAA

SEQ ID NO: 147 - protein, 249 aa, Serratia marcescens
MTQPLPLDPQAFEARRPQGAYYHIHHPYHIAMHNGEATREQIQGWVANRFYYQTSIPIKDAAIMANCPQPETRRKWVQRILDHHGTDGSEGGIEASDLGEAVGLQRDTLLSEERVLPGVRFAVDAYVNFARRACWQEAACSSLTELFAPQIHQSRLDSWPQHYPWIAAVGYDYFRSRLRQANRDVEHGLALALDYCDTVEKQQRMLEILQFKLDILWSMLDAMSMAYTLNRPPYHSVTAARVWHNQRLV

SEQ ID NO: 148 - protein, 732 aa, Marinobacter algicola
CTACAGCCCCCGGTGCCAGACCGGCTGACCGGTTACGGTGTGGTACGGCGGCGTGCGGTGCTGATAAGCCATAGTCAGGGCATCCAACATAGACCATAAGATATCCAGTTTGAATTGAAGGATTTCCAGGGCACGGGCCTGCTGTGCCGCGGTGGTAAAGTGATCCAGGGTAATGGTCAGGCCATGTTCCACATCGCGGCGCGCTTCCGACAACCGCTTGCGGAAATAGGCGTATCCATCGGTCTGGATCCAGGGATAATGCTGGGGCCAGCTATCGAGCCGGGACTGGTGAATTTCCGGCGCAAACAGTTCTGTCAGGGAGGAACAGGCCGCTTCCTGCCAAGTCGCCCGGCGGGCAAAGTTCAGGTAGGCGTCTACGGCAAACCGTACACCCGGCAGCACATGGCGCTGGTCGGTGACCTCGTCCCGGGTTAGCCCGACCGCTTCCGCCAAGCTCAACCAGGCCTCGATACCGCCTTCGTCGTCAATGTGGCCATCGTGATCCAACACTCGTTGGAGCCACAACCGGCGGACCGAGGCATCCGGGCAGTTAGCCATGATCGCCGCATCCTTGCGGGGTATGTTGATCTGGTAGTAGTACCGGTTAGCGACCCAGCCACGAATCTGCTCAGGAGTGCAGTCACCGCCATACATGGCTTTATGGTAGGGATGGTGAATGTGGTAGTACTGGCCTTTTGCACGCAGGGCCTGCTCGAAATCCCCACGATTCAT

SEQ ID NO: 149 - protein, 243 aa, Marinobacter algicola
MNRGDFEQALRAKGQYYHIHHPYHKAMYGGDCTPEQIRGWVANRYYYQINIPRKDAAIMANCPDASVRRLWLQRVLDHDGHIDDEGGIEAWLSLAEAVGLTRDEVTDQRHVLPGVRFAVDAYLNFARRATWQEAACSSLTELFAPEIHQSRLDSWPQHYPWIQTDGYAYFRKRLSEARRDVEHGLTITLDHFTTAAQQARALEILQFKLDILWSMLDALTMAYQHRTPPYHTVTGQPVWHRGL

SEQ ID NO: 150 - DNA, 756 bp, Marinobacter sp.
tcatagccccctgtgccagacttgctgatcggtaaccgtatggaacggcggcgttttgtggctgtaggccatggtcagggcgtccagcaggctccacagaatatccagtttgaactgtaaaatttcgagggcgcgggcctgctcggtagctctggtgaaatactccagcgtaatcgccaggccatgttccacatcgcggcgggcttctgataggcgcttacggaagtagctatagccggcctcgtcaatccacggataatgttctggccagctgtccagacgagactggtggatttctggcgcaaacagctcggtcagcgaggaacaagccgcttcttgccaagtcgcgcggcgcgcaaagttcaagtaggcgtccaccgcaaaacgcacgccgggcagcacgtggcgctggtcgatcacctcttcccgagtcagccccacggcttccgccaggcacaaccaggcttcaatgccgcccgcatcaccgtcgtgaccatcgtggtcaagaatgcgctgcaaccattgcttgcgcacgctggcgtcggggcaattggccataatggccgcatctttacgcgggatcattacctgataataatagcggttggccacccagccccggatttgctcagggctgcactggccaccatacatggcctgatgatacgggtgatgaatatgatagagccggcccttattgcgtaacgcctgttcaaaatccgcgcgattcagggtggtgttcacaatggcgttcat

SEQ ID NO: 151 - protein, 251 aa, Marinobacter sp.
MNAIVNTTLNRADFEQALRNKGRLYHIHHPYHQAMYGGQCSPEQIRGWVANRYYYQVMIPRKDAAIMANCPDASVRKQWLQRILDHDGHDGDAGGIEAWLCLAEAVGLTREEVIDQRHVLPGVRFAVDAYLNFARRATWQEAACSSLTELFAPEIHQSRLDSWPEHYPWIDEAGYSYFRKRLSEARRDVEHGLAITLEYFTRATEQARALEILQFKLDILWSLLDALTMAYSHKTPPFHTVTDQQVWHRGL

SEQ ID NO: 152 - DNA, 759 bp, Alpha proteobacterium
atgacaaagcaagcaccttggtctcgcgatgaatttgaagcaaagctccgtgctaaaggcgagtactaccacatctatcatccgtttcatgtagcgatgaataaaggtgaatgtagccaagaacaaattcaaggatgggtcgccaatcgcttattttatcagttagcgatcccagtaaaagatgcagggatcatggcaaattgctgggatctgcaaacccgtcgcaaatggatccagcgtatattggatcatgatggagaccctgaagatactactctaggcggtattgaagcttggttacgtctaggtgaagcggtgggtttacatcgtgaagatatgctcaatgaacgctttttattacctggtgtgaagtttgccgtcggggcatatattaactttacgcgtaaagctagctgggaagaagcagcctgttcgtcactcactgagatgttcgcacctgaaatccatcaaagtcgcctcgatacttggccaacccattataaatggattgatccagaaggattttcctattttcaaatgcgtttaaatcaggcacgtcgtgatgtacagcacggtttagagatcactttagatcattttgaaacgcgtaaacaacaagagcgtgcattgaatattctgcaattcaaacttgatgtcttatggagtatggctgatagtatcagcttagcatatgagtttaaccgcaagccttttggtgcggtaactgacgaaaatatttctcacaaaggcttcatgtaa

SEQ ID NO: 153 - protein, 252 aa, Alpha proteobacterium
MTKQAPWSRDEFEAKLRAKGEYYHIYHPFHVAMNKGECSQEQIQGWVANRLFYQLAIPVKDAGIMANCWDLQTRRKWIQRILDHDGDPEDTTLGGIEAWLRLGEAVGLHREDMLNERFLLPGVKFAVGAYINFTRKASWEEAACSSLTEMFAPEIHQSRLDTWPTHYKWIDPEGFSYFQMRLNQARRDVQHGLEITLDHFETRKQQERALNILQFKLDVLWSMADSISLAYEFNRKPFGAVTDENISHKGFM

SEQ ID NO: 154 - DNA, 756 bp, Colwellia psychrerythraea
tcatttaaaaattctcttatggtaatttggctcagctattaaaccttggtaaggcgctcggtcctgttgatatgctaaggtcatagcatcaagcatactccacaaaatatctaatttaaattggagaatatttaatgcctcgtcttgtgcttgacgagtagtaaagtgatctaaggtgatttgtaggccatgattaacatcgcgtcttgcttgagataagcgcatttgaaaatactgtaagccttgtgtttcaatccaaggataatttataggccaactgtctagcctgctttgatgtatttgaggggcaaacatttccgtcagtgacgaacatgcagcttgctgccagttagcacggcgagcaaagtttacataggcatctacggcgaatcgcaccccaggtaaaacaaatttctcatccagtaagtcttgtctatctaatcctaccgcttggcccaattgtaaccaggcttcaataccacctaaggttttgtcttctacactgccatcgtgatctaatatgcgttggatccatagacgacgagtttccatatcatgacaattagctaatatggcggcatctttaataggaatatttacttggtaataaaaacggtttgccacccaaccctgaatttgctcaacactacattcaccttggtgcatggcaatatgaaatgggtgatgaatatggtaaagctgccctttagcgcggagcatttcttcaaactgctctcttgtccatggttgttgcat

SEQ ID NO: 155 - protein, 251 aa, Colwellia psychrerythraea
MQQPWTREQFEEMLRAKGQLYHIHHPFHIAMHQGECSVEQIQGWVANRFYYQVNIPIKDAAILANCHDMETRRLWIQRILDHDGSVEDKTLGGIEAWLQLGQAVGLDRQDLLDEKFVLPGVRFAVDAYVNFARRANWQQAACSSLTEMFAPQIHQSRLDSWPINYPWIETQGLQYFQMRLSQARRDVNHGLQITLDHFTTRQAQDEALNILQFKLDILWSMLDAMTLAYQQDRAPYQGLIAEPNYHKRIFK

SEQ ID NO: 156 - DNA, 723 bp, Gamma proteobacterium
ttaccggctacagctatgaaatggcggctcttcatagacataagccaactgcattgcatccagcatactccataaaatatccagctttaactgcagtatacccatggcctgctgctgctgttcgaaggttttaaagtagtccagagtaatcgccaaaccatgctctacatctcttcgggcttcgctaagtcgcgtgcggaaatattgatagccgttgggatcgatccagggatagtgttccggccaggtcgctaagcgtttttgatgaatggtcggggcaaagagttcggtgagtgatgagcaggccgcttcctgccagttagcgcggcgggcaaagttaacgtaggcgtctactgcaaagcgcacgccgggtaatatatgttgctgacttataatttcgtctcgggttaaacccacagcctctcccaagcggagccaggcctcaataccaccactatcctcatcgctggtgccatcgtgatcaagaatacgctgcacccataaacgacgaacagaggcgtcgtcacagttggccataatggcggcgtctttgatcggtatactgatttgataataatagcggttagccacccagccctgtatctgcttttgagtacagttgccggtattcatcgcaatatggaaggggtgatgaatatggtagagcgcgcccttgtctcgtagctgctgctcaaattcttctgcagtccaggctttagtcat

SEQ ID NO: 157 - protein, 240 aa, Gamma proteobacterium
MTKAWTAEEFEQQLRDKGALYHIHHPFHIAMNTGNCTQKQIQGWVANRYYYQISIPIKDAAIMANCDDASVRRLWVQRILDHDGTSDEDSGGIEAWLRLGEAVGLTRDEIISQQHILPGVRFAVDAYVNFARRANWQEAACSSLTELFAPTIHQKRLATWPEHYPWIDPNGYQYFRTRLSEARRDVEHGLAITLDYFKTFEQQQQAMGILQLKLDILWSMLDAMQLAYVYEEPPFHSCSR

SEQ ID NO: 158 - DNA, 780 bp, Gamma proteobacterium
atgtcgctccttgataccgcttcatcgcgagacgcatctaatcaggcccctctgacccgagcagattttgaggcgcgtctgcgcgccaagggctcgcgctatcacatccaccatccttttcatcaagcgatgtacgcgggtgagctaacgcctcgacaaattcggggctgggtagccaacaggtattactaccaaataatgattcctcaaaaggatgcagcgattctggccaattgctctgaccgggaaatccgcgtgaaatggatccagcgtatccttgatcatgatggtgccgacggtgatgaaggcggtattgaagcctggttggaattggctgaagcggtgggacttaagcgtgatgaagtgaccgatcttcgctacgtgctacccggtgtgcgctttgcggtcgatgcttatgtcaacttcgcacgtaacgccacttggcaggaagccgcttgctcatcgctaacagagatgttcgcgcctgaaattcatcggtcccggctcaatacttggccgcaacattacagctggattgaccaaagcggattgaagtactttcaaaagcgtctaggagaggcccggcgtgatgttgagcatggcctggacgtaactctcgattatttcaaatatcgcgaacagcaggaaaaggcgctgggtattttacagtttaaactcgatattctgtggacaatgctggacgcaatgaccatggcctacgtgcacaccacgcccccatatcacagctgtgatgacggtattcattcggtacctgggtaa

SEQ ID NO: 159 - protein, 259 aa, Gamma proteobacterium
MSLLDTASSRDASNQAPLTRADFEARLRAKGSRYHIHHPFHQAMYAGELTPRQIRGWVANRYYYQIMIPQKDAAILANCSDREIRVKWIQRILDHDGADGDEGGIEAWLELAEAVGLKRDEVTDLRYVLPGVRFAVDAYVNFARNATWQEAACSSLTEMFAPEIHRSRLNTWPQHYSWIDQSGLKYFQKRLGEARRDVEHGLDVTLDYFKYREQQEKALGILQFKLDILWTMLDAMTMAYVHTTPPYHSCDDGIHSVPG

SEQ ID NO: 160 - DNA, 750 bp, Shewanella woodyi
atgcaagcctggactaaagaagaattcgaacaaaaactcaaagataaagggtcgctttaccatatacaccatccctaccataagatgatgcataaaggtgagtgcagcgttgaacagatcagaggttgggttgccaaccgcttctattatcagatcaatattcccgttaaagatgcagccatactggcaaactgtcgcgatgtaaaaactcgccgcatgtggatccaacgtatagtggatcatgatggttcaattgaagataacaccttaggtggtatcgaggcttggctaaaactcggtgaagcggtgggactgaatagacaagatatgctagatgaaaagtatatcctgccaggggttcggttcgcggtcgatgcctatgtgaattttgccagacgagcctcatggcaagaggcggcctgctcatcacttaccgagatgtttgcgccagagatacaccaaagtcgccttaatacctggccagaaaactacccttggataaaatccgaaggattaagctactttcagatgcgactctctcaagcaaggcgagatgttaatcatggcttagcgatcactttggcacattttacgacccgagagcagcaggagcatgcactgaatattttgcagtttaaactcgatattctttggtccatgttagatgcaatgacattagcttatcagtatgagcgtgcgccctattcacagcttattgatgcgcctgtctatcataaagggatcttctga

SEQ ID NO: 161 - protein, 249 aa, Shewanella woodyi
MQAWTKEEFEQKLKDKGSLYHIHHPYHKMMHKGECSVEQIRGWVANRFYYQINIPVKDAAILANCRDVKTRRMWIQRIVDHDGSIEDNTLGGIEAWLKLGEAVGLNRQDMLDEKYILPGVRFAVDAYVNFARRASWQEAACSSLTEMFAPEIHQSRLNTWPENYPWIKSEGLSYFQMRLSQARRDVNHGLAITLAHFTTREQQEHALNILQFKLDILWSMLDAMTLAYQYERAPYSQLIDAPVYHKGIF

SEQ ID NO: 162 - DNA, 726 bp, Gamma proteobacterium
ctagtcgatattgcagctatggaacggcgcctcattgtagacgtatgccagttgcatagcatccagcatgctccacaatatatcgagcttcatttgcagaatacccaatgcatgctcttgtgcttcgcgggtttggaagtgatccagcgtgatttgcaatccgtgctcaacatcacggcgcgcttcactgaggcgagtacgaaaataacggtagccctcagcttcaatccaggggtaatgctcaggccagctgtcgagtcttttttgatgaataattggtgcaaataattcggtcaaagacgaacaggcggcttcctgccagctcgctttgcgggcaaagttaacataagcatctaccgcgaaacggacgccgggtaatacgtgttgaaaactagtgatctcactgcgctgcagcccaacggcttcgccgaggcgcagccaggcctcaatcccgccactgtcttgctcgctagtgccgtcgtggtccaatatacgctgtacccatagcctgcgcacggtaggctcggtacagttcgcaaggatgttagcgtccttgatcgggatattaacctggtagtagtaccgattggcgacccagccttgtatttgctgctggttacattggccgctgttcattgctacatgcagaggatgatgaatatgatacaaggcttctttggcccgcaagcctcgttcgaattcttctcttgaccatggttttgacat

SEQ ID NO: 163 - protein, 241 aa, Gamma proteobacterium
MSKPWSREEFERGLRAKEALYHIHHPLHVAMNSGQCNQQQIQGWVANRYYYQVNIPIKDANILANCTEPTVRRLWVQRILDHDGTSEQDSGGIEAWLRLGEAVGLQRSEITSFQHVLPGVRFAVDAYVNFARKASWQEAACSSLTELFAPIIHQKRLDSWPEHYPWIEAEGYRYFRTRLSEARRDVEHGLQITLDHFQTREAQEHALGILQMKLDILWSMLDAMQLAYVYNEAPFHSCNID

SEQ ID NO: 164 - DNA, 753 bp, Burkholderia xenovorans
tcattgcgggaaggccttttcgatcgaatccagcatggtccacagaatgtcgagcttgaattgcaggatctcgagcgcgcgttcctgctgttcgcgccgcgtgaaatgatcgagcgtgacggcgagcccgtgctccacgtcgcgttgtgcaagcgaaatgcgcgagcggaaatacgcgagacccgaagactcgatccacggataatgttccggccagctcgcgagccggtcgcgatgaacctgcggcgcgaacatttccgtgagcgacgagcagaccgattcctgccacggcgcgcggcgcgcaaaattcacataggcgtcgacggcgaagcgcacgccgggcgccacctgtttcagcgaccacagatcgtcacgcgacagcccgaccgcgtcgcccagccgcgcccatgtttcgatgccgccttcctcgtcgccgcaaccgtcgtggtcgagaatgcgcagcacccagcggcggcgtgtttcgcgatccgggcaattcgacagcacggccgcatccttcagcggaatattgatctgataatagaagcgattggcgacccagccgcgaatctgttcgcgggagcaaccgccgctattcatcttcacattgaacggatgatgaatgtgatacgcggcgcctttcgcgcgcaactgtgcttcgaattcttcacgggtccaggccgggcgctcgtcgcctccgttcgtttgcgcgttctggcgcggcgccgtgcccaaggtatctttcgcgttcat

SEQ ID NO: 165 - protein, 250 aa, Burkholderia xenovorans
MNAKDTLGTAPRQNAQTNGGDERPAWTREEFEAQLRAKGAAYHIHHPFNVKMNSGGCSREQIRGWVANRFYYQINIPLKDAAVLSNCPDRETRRRWVLRILDHDGCGDEEGGIETWARLGDAVGLSRDDLWSLKQVAPGVRFAVDAYVNFARRAPWQESVCSSLTEMFAPQVHRDRLASWPEHYPWIESSGLAYFRSRISLAQRDVEHGLAVTLDHFTRREQQERALEILQFKLDILWTMLDSIEKAFPQ

SEQ ID NO: 166 - DNA, 726 bp, Methylococcus capsulatus
atgagccaagacacgatcccctggagccgcgaagaattcgaggctcggctgcgtgccaaggaaaagtactaccacatccatcacccttaccacgtgttgatggcgagcggtgagctgaaccgcgagcagatccagggctgggtggcgaaccgcttctattatcagatcaccattccgcgcaaggattcggccatcatggccaactgcccggaccgcgaaacccgccgcaaatggatgcagcgggtgatggatcacgacggttacggcgatgatcccggcgggatcgaggcatggatccagctaggcatcgcctgtggcctgagtcgcgaggacatcacctcgctcaggcatgtactgcccggcgtgcgtttcgccgtcgacgcctacctcaacttcgctcgtaccgcgacctggcaggaagccgcctgctcttcgctcaccgagctgtttgcgccgaccatccacaaacaacgcctggctggctggccggatctgtatccgtggatcgcagccgacggcttggcctatttccgcaagcgggtgactcaggccagccgcgatgtcgagcacggcatcgaaatcacgctggatcatttcaagacccgcgaacaacaggaacgggccctggaaatcctccaattcaagctcgacatcctgtggtcgatgttggacgccatgtacctcgcctatgtcgacaaaaaaccgccctatttcaacatcgcctga

SEQ ID NO: 167 - protein, 241 aa, Methylococcus capsulatus
MSQDTIPWSREEFEARLRAKEKYYHIHHPYHVLMASGELNREQIQGWVANRFYYQITIPRKDSAIMANCPDRETRRKWMQRVMDHDGYGDDPGGIEAWIQLGIACGLSREDITSLRHVLPGVRFAVDAYLNFARTATWQEAACSSLTELFAPTIHKQRLAGWPDLYPWIAADGLAYFRKRVTQASRDVEHGIEITLDHFKTREQQERALEILQFKLDILWSMLDAMYLAYVDKKPPYFNIA

SEQ ID NO: 168 - DNA, 708 bp, Limnobacter sp.
tcatttttttctcttgtcgggatacgccagtgcaatcgcatcggacatactccaaagcacgtccagtttgaattgcagaatttcaagtgcacgttcctgttgggcacgggttttgaaataattcaaggtcacttccaggccatgttcaacgtcgcgttgcgccaggctgattctggagcgaaaataattcaaaccttcaggtgcaacccatttgtagtctttgggccagttgctcaggcgttgcttgtgaatttctggtgcaaacatttcagtcaacgatgagcacaccgcttcttgccagggcgcgcggcgggcaaaattcacgtaggcgtccactgcaaaacgcacgcctggaagcaccagttgctggctccacagcacgtctttgtcaatgcctactgcttcacccaggcgactccaggcttcaatgccgccagcattgccttcccagccatcgtgatccagaatgcgctgcacccaacggcgacgggtttcgcgatcgtcacaattggccatcaccgcagcgtctttttgcggaatgcacacttgataataaaagcggtttgccacccagccgcgcagttgttcccggctcagtttgccctcacgcatggccacgttgaatgggtggtgaatgtgatagcggtcgccctttgcgcgcaagcgttcttcgaactcctttttgctccaggctttgttactgctcat

SEQ ID NO: 169 - protein, 235 aa, Limnobacter sp.
MSSNKAWSKKEFEERLRAKGDRYHIHHPFNVAMREGKLSREQLRGWVANRFYYQVCIPQKDAAVMANCDDRETRRRWVQRILDHDGWEGNAGGIEAWSRLGEAVGIDKDVLWSQQLVLPGVRFAVDAYVNFARRAPWQEAVCSSLTEMFAPEIHKQRLSNWPKDYKWVAPEGLNYFRSRISLAQRDVEHGLEVTLNYFKTRAQQERALEILQFKLDVLWSMSDAIALAYPDKRKK

SEQ ID NO: 170 - DNA, 708 bp, Burkholderia phymatum
atgagtgtcaaaggcagcagcggaccggcatggagccgcgatgaattcgaagcgcaattgcgtgcgaagggacaggcgtatcacatccatcatccgttcaacgtgaaaatgaacagcggcggatgttcgcacgagcagattcgcggctgggtcgcgaaccgcttctactatcagatcaacattccgctgaaggatgccgcggtgctgtcgaactgtcccgaccgcgacacgcgccgccgctgggtgctgcgcatactcgatcacgacggttacggcgaagacgaaggcggcatcgaaacatgggcgcggctcggcgatgcggtcggcctgtcgcgcgatgaactgtggtcgctcgaacacgtggtgccgggcgtgcgcttcgcggtcgacgcatacgtgaactttgcgcggcgcgcgccgtggcaggaagccgtctgctcgtcgctcaccgaaatcttcgcgccgcagatccacaaagaccggctcgccacatggcccgaacactacccgtggatcaagcccgaagggctcgcatatttccgttcgcgcatttcgcttgcacaacgcgacgtcgaacacgggctgtccgtcacgctcgatcatttccgcacgcgcgaccagcaacagcgcgcgctcgacattctgcaattcaagctcgacattctgtggacgatgctcgacgccatcgagaaggccttcccagcatga

SEQ ID NO: 171 - protein, 235 aa, Burkholderia phymatum
MSVKGSSGPAWSRDEFEAQLRAKGQAYHIHHPFNVKMNSGGCSHEQIRGWVANRFYYQINIPLKDAAVLSNCPDRDTRRRWVLRILDHDGYGEDEGGIETWARLGDAVGLSRDELWSLEHVVPGVRFAVDAYVNFARRAPWQEAVCSSLTEIFAPQIHKDRLATWPEHYPWIKPEGLAYFRSRISLAQRDVEHGLSVTLDHFRTRDQQQRALDILQFKLDILWTMLDAIEKAFPA

SEQ ID NO: 172 - DNA, 720 bp, Burkholderia cenocepacia
atgaacgcaccgatccccgctacggcgttgcacgcgacgccctggaccgcgaccgaattcgaggcgcgcctgcgtgcgctcgaatcgcgctatcacattcatcatccgttcaaccggcggctcaacagcggcgcctgttcgcccacgcagatccgcggctgggtcgcgaaccgcttctactaccagatctgcatcccgctcaaggatgcggcgatcctgtcgaactgccccgaccgcgagacgcgacgccgctggattcagcggctgatcgaccacgacgggcagggcgacaacgcaggcggcatcgaggcgtgggtgcggctcggcgaagcgtgcggcctcacgcgcgacgagctgtggtcgctcgaacacgtgctgcccggcgtgcgtttcgcggtggatgcgtacgtgaacttcgcgcggcgcgcgccgtggcaggaagccgtgtgctcgtcgctgaccgagatgttcgcgccgcagatccatctcgaccggctcgcgggctggccgtcgcattacccgtggatcgaaccggccgggctgcattacttccgcagccgcgtgccgctcgcgcagcgcgacgtcgagcacgggctcgcggtgacgctcgcgcatttcacgacaccggaggcgcagcagcgcgcgctcggcattctgcaattcaagctcgacatcctgtggtcgatgctcgacgccgtcgaaaaggcctacccgttatga

SEQ ID NO: 173 - protein, 239 aa, Burkholderia cenocepacia
MNAPIPATALHATPWTATEFEARLRALESRYHIHHPFNRRLNSGACSPTQIRGWVANRFYYQICIPLKDAAILSNCPDRETRRRWIQRLIDHDGQGDNAGGIEAWVRLGEACGLTRDELWSLEHVLPGVRFAVDAYVNFARRAPWQEAVCSSLTEMFAPQIHLDRLAGWPSHYPWIEPAGLHYFRSRVPLAQRDVEHGLAVTLAHFTTPEAQQRALGILQFKLDILWSMLDAVEKAYPL

SEQ ID NO: 174 - DNA, 720 bp, Burkholderia cenocepacia
atgaacgcaccgatccccgctacggcgttgcacgcgacgccctggaccgcgaccgaattcgaggcgcgcctgcgtgcgctcgaatcgcgctatcacattcatcatccgttcaaccggcggctcaacagcggcgcctgttcgcccacgcagatccgcggctgggtcgcgaaccgcttctactaccagatctgcatcccgctcaaggatgcggcgatcctgtcgaactgccccgaccgcgagacgcggcgccgctggattcagcggctgatcgaccacgacgggcagggcgacaacgcaggcggcatcgaggcgtgggtgcggctcggcgaagcgtgcggcctgacgcgcgacgagctgtggtcgctcgaacacgtgctgccgggcgtgcgtttcgcggtggatgcgtatgtgaacttcgcgcggcgcgcgccctggcaggaagccgtgtgctcgtcgctgaccgagatgttcgcgccgcagatccatctcgaccggctcgcgggctggccgtcgcattacccgtggatcgaaccggccgggctgcattacttccgcagccgcgtgccgctcgcgcagcgcgacgtcgagcatgggctcgcggtgacgctcgcgcatttcacgacaccggacgcgcagcagcgcgcgctcggcattctgcaattcaagctcgacatcctgtggtcgatgctcgacgccgtcgaaaaggcctacccgttatga

SEQ ID NO: 175 - protein, 239 aa, Burkholderia cenocepacia
MNAPIPATALHATPWTATEFEARLRALESRYHIHHPFNRRLNSGACSPTQIRGWVANRFYYQICIPLKDAAILSNCPDRETRRRWIQRLIDHDGQGDNAGGIEAWVRLGEACGLTRDELWSLEHVLPGVRFAVDAYVNFARRAPWQEAVCSSLTEMFAPQIHLDRLAGWPSHYPWIEPAGLHYFRSRVPLAQRDVEHGLAVTLAHFTTPDAQQRALGILQFKLDILWSMLDAVEKAYPL

SEQ ID NO: 176 - DNA, 720 bp, Burkholderia cenocepacia
atgaacgcaccgatccccgctacggcgttgcacgcgacgccctggaccgcgaccgaattcgaggcgcgcctgcgtgcgctcgaatcgcgctatcacatccaccatccgttcaaccggcggctcaacagcggcgcttgttcgcccacgcagattcgcggctgggtcgcgaaccgtttctattaccagatctgcatcccgctcaaggatgcggcgatcctgtcgaactgccccgaccgcgacacgcggcgccgctggatccagcggctgatcgaccacgacgggcagggcgacaacgccggcggcatcgaggcgtgggtgcggctcggcgaagcgtgcggcctggcgcgcgacgagctgtggtcgctcgaacacgtgctgcccggcgtgcgtttcgcggtggatgcgtatgtgaacttcgcgcggcgcgcgccctggcaggaagccgtgtgctcgtcgctgaccgagatgttcgcgccgcagatccatctcgaccggctcgcgggctggccgtcgcattacccgtggatcgagccggccgggctgcattacttccgcagccgcgtgccgctcgcgcagcgcgacgtcgagcatgggctcgcggtgacgctcgcgcatttcacgacaccggacgcgcagcagcgcgcgctcggcattctgcaattcaagctcgacatcctgtggtcgatgctcgacgccgtcgaaaaggcctacccgttatga

SEQ ID NO: 177 - protein, 239 aa, Burkholderia cenocepacia
MNAPIPATALHATPWTATEFEARLRALESRYHIHHPFNRRLNSGACSPTQIRGWVANRFYYQICIPLKDAAILSNCPDRDTRRRWIQRLIDHDGQGDNAGGIEAWVRLGEACGLARDELWSLEHVLPGVRFAVDAYVNFARRAPWQEAVCSSLTEMFAPQIHLDRLAGWPSHYPWIEPAGLHYFRSRVPLAQRDVEHGLAVTLAHFTTPDAQQRALGILQFKLDILWSMLDAVEKAYPL

SEQ ID NO: 178 - DNA, 696 bp, Dechloromonas aromatica
atgatgaccccgtggaatcacgccgaattcgaggcgaaactgcgcgacaagggggccgcttaccacatctaccatccgttcaacgtcttgctgaacaccgggcaggcgaagcgcgaacagatccagggctgggtggccaaccgctactattaccagatcatcatcccggtcaaggatgcggcgatcatgtccaactgccctgatcgcgaaatacggcgcgactggattcagcgcatcatcgaccacgatggccgtggcgacgacgccggtggtatcgaagcgtggattcgcctaggtgaagcggtcgggctggcgcgagaagaaatcaccgatctgcgccacgttattccagccgtgcgctttgcctgtgatgcctatctcaacttctgtcgccggcagccgtggcaggaagcggtgtgttcgtcgctgaccgagttgttcgcgccgaagattcacaaggagcgcctggccaactggcccgagttctacccatggatcgaatcgaccggcctgcagtattttcgtaaccgggttacccaggccaggcgcgacgtcgagcaggggctggcggttaccctagactacttcgataccccggccctgcaggctcgtgcgctggacatcctgcagttcaagctcgacatcctgtggtcaatgaacgatgccatggcgctgcgctatggcgtcaacaaatga

SEQ ID NO: 179 - protein, 231 aa, Dechloromonas aromatica
MMTPWNHAEFEAKLRDKGAAYHIYHPFNVLLNTGQAKREQIQGWVANRYYYQIIIPVKDAAIMSNCPDREIRRDWIQRIIDHDGRGDDAGGIEAWIRLGEAVGLAREEITDLRHVIPAVRFACDAYLNFCRRQPWQEAVCSSLTELFAPKIHKERLANWPEFYPWIESTGLQYFRNRVTQARRDVEQGLAVTLDYFDTPALQARALDILQFKLDILWSMNDAMALRYGVNK

SEQ ID NO: 180 - DNA, 723 bp, Nitrosococcus oceani
gtggcgggaaaaaaaccctggagccgtgaagaattcgagcagaagctgcaggaaaaagaatgcttctaccacattcaccaccccttccaggtattaatgaacaacggcaagctgaaccagtaccaggtccaaggatgggtagccaaccgcttttattaccatacctgtatccctctcaaggatgccgctatcctagccaactgctcccagcgatcagtgcggcgccaatgggtacagcgaatcctggatcatgacggttacggcgaagacgtaggtggcatcgaagcctggcttcagctaggcgaagccgtgggcttaagccgggaaacgctggaatcccagcaacaggttctgcccggagtacgctttgccgttgacgcttatgtcaactttgcccgccatgctacctggcaggaagctgtctgctcttctcttacggagctctttgccccttcgctccatcaacaacgattagacaactggcctcgctattacccttggattaaagcggaaggctaccattattttcgcaagcgcctcaacgaagcccgacgggatgttcgacacggcctagaagcgaccctggattactttcaaagccgcacccagcaggagcaggcgctagctatcttacagtttaaactggatgtactatggaccctactggatgccctctggatggcgtacattgaaaatcgtcccccctatcacacagagctttaa

SEQ ID NO: 181 - protein, 240 aa, Nitrosococcus oceani
MAGKKPWSREEFEQKLQEKECFYHIHHPFQVLMNNGKLNQYQVQGWVANRFYYHTCIPLKDAAILANCSQRSVRRQWVQRILDHDGYGEDVGGIEAWLQLGEAVGLSRETLESQQQVLPGVRFAVDAYVNFARHATWQEAVCSSLTELFAPSLHQQRLDNWPRYYPWIKAEGYHYFRKRLNEARRDVRHGLEATLDYFQSRTQQEQALAILQFKLDVLWTLLDALWMAYIENRPPYHTEL

SEQ ID NO: 182 - DNA, 714 bp, Ralstonia pickettii
tcagcgagtgggatacgcgcgctcaatcgcgtcaagcatcgaccagaggacatcaagtttgaattgcaggatgtcgagggcgcgctcttgctgcgcacgtgtcgtgaagtgtgccagtgtcaccttcaggccatgttcgacatcgcgctgtgcgagcgtgatccggctgcggaagtagtgcagaccaccggcttcgatccacggataatgttgcggccagttggctagccggtcgcggtgaatctttggcgcaaacatttcggtcagcgatgagcacaccgcctcttgccacggcacgctccgtgcaaaattcacgtaagcgtcgacggcaaagcgtacacccggcactacatgcttgagcgaccagaggtcttgctcaggtatgcctgcagcctcacccagccgcacccaggcctcgataccgccagggctatcagcattcccatcatgatcgagaattctctgcacccaaagccggcgggtttcgcgatccgggcaattggcgatgatggcgccatccttgcgagggatgttgacctggtaataaaaacggttggcgatccagccccgaacctggtcgggcgtcagttcaccattgttcatgcgcacgttgaacggatgatggatgtggtagccagcgccctttgcgcgcaactgcacctcgaactcctcaggcggccatgcagcgtcggggcttgcgttggttcggctcaa

SEQ ID NO: 183 - protein, 237 aa, Ralstonia pickettii
MSRTNASPDAAWPPEEFEVQLRAKGAGYHIHHPFNVRMNNGELTPDQVRGWIANRFYYQVNIPRKDGAIIANCPDRETRRLWVQRILDHDGNADSPGGIEAWVRLGEAAGIPEQDLWSLKHVVPGVRFAVDAYVNFARSVPWQEAVCSSLTEMFAPKIHRDRLANWPQHYPWIEAGGLHYFRSRITLAQRDVEHGLKVTLAHFTTRAQQERALDILQFKLDVLWSMLDAIERAYPTR

SEQ ID NO: 184 - DNA, 792 bp, Azoarcus sp.
atggaagccgaactgctcgccgcgcctgctgcacgtacgcttgcccccaacgccggcacccacgaccgcccgccgatgtcgcgcgaggaattcgaagcgcagctgcgcgccaagggcaccagctaccacatctaccaccccttccacgtgatgatggccgaagggcgcctgacgccggcccagctgcgcggctgggtggcgaaccgcttctactaccagatcgcgatcccggtgaaggacgcggccatcatgtccaactgcccggaccgcgagatccgccgcgagtggatacagcgcatcctcgaccacgacggctacgagatcggcggtgtgtccgaccccggcggcatcgaggcctggatacggctgggcgaggcggtggggctgagccgcgacgatgtcacctcgctgcgcttcgtcgcgccggcggcgcgctttgcggtggatgcctacatcaatttcgcccgccagcggccgtgggaagaggcggtggcttccagccttaccgagttgttcgcaccccacatccaccagcagcgcatcgacacctggccgcaggtctatccctgggtgaagaccgagggtttgcagtatttccgcaaccgcctgacccaggcgcgccgcgacgtcgcccacggcctgcgcttcacgctggagcacttcagccagacgcgcgcgctgcaggaacgcgcgctggagatcctgcagttcaagctcgacgtgctgtgggcgctggccgacgcgatcatgctcagccagtgcgaaatcgagatcaaggggccgaaggcatga

SEQ ID NO: 185 - protein, 263 aa, Azoarcus sp.
MEAELLAAPAARTLAPNAGTHDRPPMSREEFEAQLRAKGTSYHIYHPFHVMMAEGRLTPAQLRGWVANRFYYQIAIPVKDAAIMSNCPDREIRREWIQRILDHDGYEIGGVSDPGGIEAWIRLGEAVGLSRDDVTSLRFVAPAARFAVDAYINFARQRPWEEAVASSLTELFAPHIHQQRIDTWPQVYPWVKTEGLQYFRNRLTQARRDVAHGLRFTLEHFSQTRALQERALEILQFKLDVLWALADAIMLSQCEIEIKGPKA

SEQ ID NO: 186 - DNA, 720 bp, Burkholderia multivorans
tcatgcgcaatacgccttttcaatggcatcgaggatcgaccacagcacgtcgagcttgaacgtcagaatctcgagcgcgcgccgttgcgcgtccgcggtcgtgaaatgcgcgagcgtgaccgcgaggccgtgttcgacgtcgcgctgcgcgagcggcaggcggctgcggaaatactgcagcccgtccgcgtcgatccacgaatagtgcgacggccagccggcgagacggtcgaggtggatctgcggcgcgaacatctcggtcagcgacgagcagaccgcttcctgccacgtcgcgcgccgcgcgaagttcacgtacgcgtcgacggcaaagcgcacgcccggcagcacgtgctcgagcgaccacagcgccgcgcgatcgagaccgaccgcctcgccgagccgcacccacgcttcgatgccgccggcatcgtcgccgtgcccgtcgtgatcgaggatgcgctgcacccacagccggcgcgtgtcgcggtccggacagttcgagaggatcgccgcgtccttcagcgggatgctgatctgatagtagaagcggttcgcgacccagccgcgaatctgcgcgggcgtgcacgcgcccgcattgagccgccggttgaacggatggtgaatgtgatagcgcgattcgagcgcgcgcagacgcgcctcgaattcgtcggcgctccacgggctcgcgtgcagcgccgccgcggaaatcggtgcgttcat

SEQ ID NO: 187 - protein, 239 aa, Burkholderia multivorans
MNAPISAAALHASPWSADEFEARLRALESRYHIHHPFNRRLNAGACTPAQIRGWVANRFYYQISIPLKDAAILSNCPDRDTRRLWVQRILDHDGHGDDAGGIEAWVRLGEAVGLDRAALWSLEHVLPGVRFAVDAYVNFARRATWQEAVCSSLTEMFAPQIHLDRLAGWPSHYSWIDADGLQYFRSRLPLAQRDVEHGLAVTLAHFTTADAQRRALEILTFKLDVLWSILDAIEKAYCA

SEQ ID NO: 188 - DNA, 735 bp, Verminephrobacter eiseniae
atgcccgcccccgttgccccagccattgcgcccaccgtcccgccagccatccccgacgccgagcgcgccgccttcgaggcccggctgcgcgcactgcaagcgcgctaccacatccaccacccgttcaaccaacgcatggccagcgggcaatgctcacgcgcccagatacagggctgggtggcgaaccgcttttactaccaggtcaacattccgctcaaggatgcggccatcctgtcgaactgccccgaccgcgcaacgcggcgcgaatgggtggtgcgcattctcgaccacgatggcagcgccgccgagcccggcggcatcgaagcctggagccggctcggcgaggccgtggggctgacgcgcgcggccctgtggtcacagcagatggtgctgcccggggtgcgctttgcggtcgatgcctacgtcaactttgcgcggcgcgcaccttggcaggaagccgtgtgctcgtcgctgaccgagatgttcgcgcccgccatccaccaggaacggctggccggctggccgcagcactacccctggatcgaagccgaaggtctggcctatttccgttcacgcatcccgctggcgcagcgcgatgtcgagcatggcctgcgcgtcacgctcgagcactttcgcacgccggccgagcagcagcgcgccacgcaaatcctgcagttcaagctcgacatcctgtggtcgatgctcgacgcgatcgaaaaggcgtaccccgaatga

SEQ ID NO: 189 - protein, 244 aa, Verminephrobacter eiseniae
MPAPVAPAIAPTVPPAIPDAERAAFEARLRALQARYHIHHPFNQRMASGQCSRAQIQGWVANRFYYQVNIPLKDAAILSNCPDRATRREWVVRILDHDGSAAEPGGIEAWSRLGEAVGLTRAALWSQQMVLPGVRFAVDAYVNFARRAPWQEAVCSSLTEMFAPAIHQERLAGWPQHYPWIEAEGLAYFRSRIPLAQRDVEHGLRVTLEHFRTPAEQQRATQILQFKLDILWSMLDAIEKAYPE

SEQ ID NO: 190 - DNA, 720 bp, Burkholderia vietnamiensis
tcatgcgggatatgccttttcgatcgcatcgagaatctgccacaggacatccagcttgaacgacaggatgtcgagcgcgcgccgttgcgcgtcaggtgtcgtgaaatgactcagcgtcaccgcgagcccgtgctcgacgtcgcgctgcgcgagcggcacgcggctgcggaaatactgcaggccgtcggcctcgatccacgggtagtgcgacggccagccggccagccggtcgaggtggatctgcggcgcgaacatctcggtcagcgacgagcacacggcttcctgccacggcgcgcgacgcgcgaagttgacgtacgcatcgaccgcgaagcgcacgcccggcagcacgtgctcgagcgaccacagctgcgcgcgctcgatgccgaccgcctcgccgagccgcgcccacgcctcgatgccgccttcgctctcgccgtgcccgtcgtggtcgagaatccgctcgacccacaggcggcgcgtctcgcggtcggggcagttcgacaggatcgccgcgtccttcagcggaatgctgatctgatagtagaagcggttcgcgacccagccgcgaatctgctcgcgcgagcattcgccggcattcatccgccggttgaacggatgatgaatgtgatagcgcgattcgagcgcgcgcaggcgcgcctcgaactcctgcgcgctccagggcgtcgcgtgcagcgccgcggcgggaatcggtgcgttcat

SEQ ID NO: 191 - protein, 239 aa, Burkholderia vietnamiensis
MNAPIPAAALHATPWSAQEFEARLRALESRYHIHHPFNRRMNAGECSREQIRGWVANRFYYQISIPLKDAAILSNCPDRETRRLWVERILDHDGHGESEGGIEAWARLGEAVGIERAQLWSLEHVLPGVRFAVDAYVNFARRAPWQEAVCSSLTEMFAPQIHLDRLAGWPSHYPWIEADGLQYFRSRVPLAQRDVEHGLAVTLSHFTTPDAQRRALDILSFKLDVLWQILDAIEKAYPA

SEQ ID NO: 192 - DNA, 735 bp, Methylophilales bacterium
atgacaaaaccttggacaagagacgagtttgaagatcgactaagaaagaagggtaaggggtatcatatataccatccttttcacgtaatgatgtacgaaggaaaacttagcaaagaacaactacaaagctgggttttaaaccgtttttactatcagataagcatcccattaaaagatgcggcaatcttatcaaattgccccgtgaaagaaatcagaaaagaatggatagtaagaatattagaccatgatggagagggagatgctgacggtgggattgaggcatggattaatttaggtagagcagtcggactaacacgagaggatgttacttctttaaagcatgtaagtcctggagttaaatttgccgtagatgcctatataaatttcgcaaaacaaaaatcgtggcaagagtctgtttgctcctcattaactgaattatttgcaccacacattcatcaacaaagaattagctcatggccgtctatgtacccatggatcgatgaatctggcctcacatactttaaaaagcgacttacggaagcgagacgggatgtggagcatggtttaggtgtaacccttgattattttagtaaaacacgtgaaacacaagagcaagctttagaaatacttcaatttaaacttaatgttttatgggttattgcagattcaatcatgctagcatcatctaatattaaggtagaagatcgagactacttaaggcaaccaataaactaa

SEQ ID NO: 193 - protein, 244 aa, Methylophilales bacterium
MTKPWTRDEFEDRLRKKGKGYHIYHPFHVMMYEGKLSKEQLQSWVLNRFYYQISIPLKDAAILSNCPVKEIRKEWIVRILDHDGEGDADGGIEAWINLGRAVGLTREDVTSLKHVSPGVKFAVDAYINFAKQKSWQESVCSSLTELFAPHIHQQRISSWPSMYPWIDESGLTYFKKRLTEARRDVEHGLGVTLDYFSKTRETQEQALEILQFKLNVLWVIADSIMLASSNIKVEDRDYLRQPIN

SEQ ID NO: 194 - DNA, 753 bp, Methylobacillus flagellatus
ttatcgtggctgtctgagatagtcgacatgttgttctaccttgatgttggttgaggcaagcataatggcatcggcaatgacccacagcacatccagcttgaattgcagaatatccagtgccttttcttgcaattcacggctctggctgaagtaatccagggtcacggcgagcccttgctcgacatcgcgcctggcttcggtcaggcgcttcttgaaataggtcaggccctcttccttaacccagggatacatgctgggccaggagctgatgcgctgttgatggatgtgcggcgcaaacagttcggtcagagaggaacagacggcctcctgccaagggcgctgcttggcgaaattgacataggcatccactgcgaacctgacaccgggcgcgacaaacttgagggacgtcacgtcctcgcgactcaggccgactgcctggccgagctgtatccacgcctcgatgccaccgacgttatttgcatccccgtcatggtcaatgatgcgttggatccatcccttacggatttccttgtccgggcagttggacagaatggccgcatccttttgcgggatgctgatctggtaataaaagcggttggcgacccagcactgcaattgctcgcgggtgagcttgccttcatacatcatcacgtggaacgggtggtagatatggtatcccctacccttgtcgcgcagcttctgctcgaactcttcgcgtgtccagggaatattatctgtcagtggtgcattcat

SEQ ID NO: 195 - protein, 250 aa, Methylobacillus flagellatus
MNAPLTDNIPWTREEFEQKLRDKGRGYHIYHPFHVMMYEGKLTREQLQCWVANRFYYQISIPQKDAAILSNCPDKEIRKGWIQRIIDHDGDANNVGGIEAWIQLGQAVGLSREDVTSLKFVAPGVRFAVDAYVNFAKQRPWQEAVCSSLTELFAPHIHQQRISSWPSMYPWVKEEGLTYFKKRLTEARRDVEQGLAVTLDYFSQSRELQEKALDILQFKLDVLWVIADAIMLASTNIKVEQHVDYLRQPR

SEQ ID NO: 196 - DNA, 693 bp, Ralstonia eutropha
atgacatattccaccgcatcgggtcccgcggagttcgaagcgcggctgcgcgccaaagaaaccggctaccacattcatcacccgttcaaccagcgcatggcggccggattgtgttcgccgggacagatccgcgcctgggtcgccaaccgcttctactaccaggccaatatcccgctgaaggacgccgccatccttgccaactgccccgagcgcgacacgcgccgcgagtgggtggtacgcatcctggaccacgacgggactgacacccagcccggtggcattgaagcctggctgcggctgggccaagccatagggctcgagcgcgcggcattgcttgaccatcggcacgtgctcccaggggtgcgctttgccgtcgacgcctatgtcaactttgcgcggcgagcgccgtggcaggaagccgtgtgctcctcgctcaccgagatgtttgccccggagatccacaaggagcggctcgcgggctggcccacgcattacccttggatcgaggccgccgggctcgattactttcgctcgcgcatcccgctcgcgcagcgcgacgtcgagcacggcctgcgcgtgacgctgggctacttccgtacaccggagcaacagcaacgcgcgctcgatatcctgcaattcaagctcgacgtgctgtggtcgatgctcgatgccatccagctagccaacccatga

SEQ ID NO: 197 - protein, 230 aa, Ralstonia eutropha
MTYSTASGPAEFEARLRAKETGYHIHHPFNQRMAAGLCSPGQIRAWVANRFYYQANIPLKDAAILANCPERDTRREWVVRILDHDGTDTQPGGIEAWLRLGQAIGLERAALLDHRHVLPGVRFAVDAYVNFARRAPWQEAVCSSLTEMFAPEIHKERLAGWPTHYPWIEAAGLDYFRSRIPLAQRDVEHGLRVTLGYFRTPEQQQRALDILQFKLDVLWSMLDAIQLANP

SEQ ID NO: 198 - DNA, 720 bp, Burkholderia ambifaria
atgaacgcaccgattcccgccgcggcgctgcacgcgacgccctggagtgcgcaggagttcgaggcgcgtctgcgcgcgctcgaatcgcgctaccacatccatcacccgttcaaccggcgcctgaataccggcgcgtgctcgcccgagcagatccgcggctgggtcgcgaaccgcttctactaccagatcagcattccgctgaaggacgcggcgatcctgtccaattgcccggaccgcgatacgcgccgactgtgggtcgagcggatcctcgatcacgatggtcacggcgggcaggaaggcgggatcgaggcatgggcgcgcctcggcgaagcggtcggcatcgagcgcgcggaattgtggtcgctcgtgcacgtgctgcccggcgtgcggttcgcggtcgacgcgtacgtgaatttcgcgcggcatgcgccatggcaggaagccgtgtgctcgtcgctgaccgagatgttcgcgccacagatccatctcgatcggctcgcggggtggccgtcccactatccgtggatcgaggcggacgggctgcagtatttccgcagccgcgtgccgctcgcgcagcgcgacgtcgagcacgggctcgcggtcacgctgaaccatttcacgacaccggacgcgcaacggcgcgcgctcgacatcctgtcgttcaagctggatgtgctgtggtcgattctcgacgcgattgaaaaggcctaccccgcatga

SEQ ID NO: 199 - protein, 239 aa, Burkholderia ambifaria
MNAPIPAAALHATPWSAQEFEARLRALESRYHIHHPFNRRLNTGACSPEQIRGWVANRFYYQISIPLKDAAILSNCPDRDTRRLWVERILDHDGHGGQEGGIEAWARLGEAVGIERAELWSLVHVLPGVRFAVDAYVNFARHAPWQEAVCSSLTEMFAPQIHLDRLAGWPSHYPWIEADGLQYFRSRVPLAQRDVEHGLAVTLNHFTTPDAQRRALDILSFKLDVLWSILDAIEKAYPA

SEQ ID NO: 200 - DNA, 711 bp, Ralstonia eutropha
tcatgggttggcttgctggatggcgtcgagcatcgaccagagcacgtcgagcttgaactgcaggatgtcgagggcgcgctgctgttgcgccgcgctgcggaaatggcccagcgtcacgcgcaggccatggtccacgtcgcgctgcgcgagcggaatgcgagagcggaagtagtccagcccggcggcctcgatccacgggtaatgcgtgggccagccggccaggcgttccttgtggattgcgggcgcgaacatctccgtcagcgacgagcacacggcttcctgccacggtgcgcggcgcgcaaagttgacgtaggcatcgacggcaaagcgcaccccgggcagcacgtgccggtggctcagcagtgcttcgcgctccaggcccaccgcctggcccaggcgcagccaggcctcgatgccgccgggctgggtgtcggtgccgtcgtggtcaaggatgcgcaccacccactcgcggcgggtgtcgcgctcggggcaattggacaggatggcggcgtccttcagcgggatgttgtcctgatagtagaagcggttggccacccatgcgcggatctgcgcgggcgaacactggcctgccgccatgcgctggttgaagggatggtggatgtggtagccgctttccatggcgcgcaggcgggcctcgaactcggcctcggtccaggcgatgggggggatggggaggatggcagttgtcat

SEQ ID NO: 201 - protein, 236 aa, Ralstonia eutropha
MTTAILPIPPIAWTEAEFEARLRAMESGYHIHHPFNQRMAAGQCSPAQIRAWVANRFYYQDNIPLKDAAILSNCPERDTRREWVVRILDHDGTDTQPGGIEAWLRLGQAVGLEREALLSHRHVLPGVRFAVDAYVNFARRAPWQEAVCSSLTEMFAPAIHKERLAGWPTHYPWIEAAGLDYFRSRIPLAQRDVDHGLRVTLGHFRSAAQQQRALDILQFKLDVLWSMLDAIQQANP

SEQ ID NO: 202 - DNA, 711 bp, Ralstonia pickettii
atgacacatcctgttgcctggacggccgaagagttcgaagcacggctgcgcgcgaagcaggcgggctatcacattcatcatccgttcaacctgcgcatgcgcgctggcgaatgcacgccggaggaaatccgcacgtgggttgcgaaccgtttctactaccaggtcaacatcccgctcaaggatgcggccatcctgtccaactgccccgaccgggcaacgcgccgcgagtggatcgtccgcatccacgaccacgacggcgacgatgcgcagccgggcggcatcgagagctgggtgcgcttaggcgttgccgtgggcctgacgcgcgacgcgctgtggtctcaccggcatctgctgccgggcgtgcgctttgcggtggatgcgtatgtgaactttgcgcgccgcgcgccgtggcaggaagcagtgtgctcctcgctcacggagatgttcgcgccggacattcacaaggaacgactggccggctggcccgagcactatccgtgggtgcagccggaggggctggcgtacttccgctcgcgcattccgctggcctcgcgcgacgtcgagcacggcctgcgcgtgacactcgactacttccgcacgccggagcagcaactgcgtgcgctggacatcctgcagttcaagctcgacatcctctggtcgatgctcgatgccatccaacaggcccacgcacatgagccctcccttgtctga

SEQ ID NO: 203 - protein, 236 aa, Ralstonia pickettii
MTHPVAWTAEEFEARLRAKQAGYHIHHPFNLRMRAGECTPEEIRTWVANRFYYQVNIPLKDAAILSNCPDRATRREWIVRIHDHDGDDAQPGGIESWVRLGVAVGLTRDALWSHRHLLPGVRFAVDAYVNFARRAPWQEAVCSSLTEMFAPDIHKERLAGWPEHYPWVQPEGLAYFRSRIPLASRDVEHGLRVTLDYFRTPEQQLRALDILQFKLDILWSMLDAIQQAHAHEPSLV

SEQ ID NO: 204 - DNA, 768 bp, Acidiphilium cryptum
atgatgagagccgatctcctggccgaggcgccaccagccgatgatggccgcgcgccctggtctcacgccgaattcgaggcgaagctgcgcgaggccggcagcgcctaccacatccaccatccgttcaacgtgatgctcaacaccggcaaggcgacgccggagcagatccgcatgtgggtcgccaaccgcttctattaccagatcgcgatcccggtgaaggacgcggcgatcctctccaactgccccgaccgcgagatccgccgcggctggatccgccgcctcctcgaccatgacgggttcgactacgaactgcccgacggctcgcgcctgcgcgacgagggcggcatcgaggcctggctccgcctcggcatcgccaccggcctcgcgcgcgaggagatgctcgacctgcgccacctcttgcccggcgtgcgcttcgcggtcgacgcctatgtcaatttcgcccgccgcgcgccctggcaggaggccgtctgctcctcgctgaccgagcttttcgcccccgacatccaccgccagcgcctcgccacctggcccggccactatccctggatcgagagcgaggggctcgactacttccgcaaccgcaccagccaggccccgcgcgacgtcgtccacggcctgcggatcacgctcgcccatttcgcgacccggccgatgcaggagcgcgccctgcagatcctcaagttcaagctggacattctgtggacgatgaacgacgagatgggacgacattacggcgtcgccgcctga

SEQ ID NO: 205 - protein, 255 aa, Acidiphilium cryptum
MMRADLLAEAPPADDGRAPWSHAEFEAKLREAGSAYHIHHPFNVMLNTGKATPEQIRMWVANRFYYQIAIPVKDAAILSNCPDREIRRGWIRRLLDHDGFDYELPDGSRLRDEGGIEAWLRLGIATGLAREEMLDLRHLLPGVRFAVDAYVNFARRAPWQEAVCSSLTELFAPDIHRQRLATWPGHYPWIESEGLDYFRNRTSQAPRDVVHGLRITLAHFATRPMQERALQILKFKLDILWTMNDEMGRHYGVAA

SEQ ID NO: 206 - DNA, 729 bp, Burkholderia dolosa
atgaccacgatgaacgcaccgcttcccgctaccgcgctgcacgcgacgccctggagcgcgcaggagttcgaggcgcacctgcgcgcgctcgaatcgcgctatcacattcatcatccgttcaaccggcggctgaactcgggcgcgtgctcgcccgagcagatccgcggctgggtcgcgaaccgcttctactaccagatcagcattccgctgaaggacgcggcgatcctgtcgaattgtccggaccgcgacacgcgccgactgtgggtgcagcggattctcgatcacgacggacacggcggcgacgcaggcggaatcgaagcgtgggcgcggctcggcgaagcggtcggcatcccgcgctcgcaactgtggtcgctcgaacgcgtgctgcccggcgtgcgcttcgcggtcgatgcgtatgtgaacttcgcgcgccgcgcgccgtggcaggaagccgtgtgctcgtcgctgacggagatgttcgcgccgcagatccacctcgaccggctcgcgggctggccgtcgcactacccgtggatcgacgcggacgggctgcagtatttccgcagccgcgtgccgctcgcgcagcgcgacgtcgagcacgggctcgcggtgacgctgcgccatttcacgacaccggaagcgcaacgacgagcgctcgacatcctgtcgttcaagctggatgtcctgtggtcgatcctcgatgcaatcgaaaaggcgtatcccgcatga

SEQ ID NO: 207 - protein, 242 aa, Burkholderia dolosa
MTTMNAPLPATALHATPWSAQEFEAHLRALESRYHIHHPFNRRLNSGACSPEQIRGWVANRFYYQISIPLKDAAILSNCPDRDTRRLWVQRILDHDGHGGDAGGIEAWARLGEAVGIPRSQLWSLERVLPGVRFAVDAYVNFARRAPWQEAVCSSLTEMFAPQIHLDRLAGWPSHYPWIDADGLQYFRSRVPLAQRDVEHGLAVTLRHFTTPEAQRRALDILSFKLDVLWSILDAIEKAYPA

SEQ ID NO: 208 - DNA, 720 bp, Burkholderia dolosa
atgaacgcaccgcttcccgctaccgcgctgcacgcgacgccctggagcgcgcaggagttcgaggcgcacctgcgcgcgctcgaatcgcgctatcacattcatcatccgttcaaccggcggctgaactcgggcgcgtgctcgcccgagcagatccgcggctgggtcgcgaaccgcttctactaccagatcagcattccgctgaaggacgcggcgatcctgtcgaattgtccggaccgcgacacgcgccgactgtgggtgcagcggattctcgatcacgacggacacggcggcgacgcaggcggaatcgaagcgtgggcgcggctcggcgaagcggtcggcatcccgcgctcgcaactgtggtcgctcgaacgcgtgctgcccggcgtgcgcttcgcggtcgatgcgtatgtgaacttcgcgcgccgcgcgccgtggcaggaagccgtgtgctcgtcgctgacggagatgttcgcgccgcagatccacctcgaccggctcgcgggctggccgtcgcactacccgtggatcgacgcggacgggctgcagtatttccgcagccgcgtgccgctcgcgcagcgcgacgtcgagcacgggctcgcggtgacgctgcgccatttcacgacaccggaagcgcaacgacgagcgctcgacatcctgtcgttcaagctggatgtcctgtggtcgatcctcgatgcaatcgaaaaggcgtatcccgcatga

SEQ ID NO: 209 - protein, 239 aa, Burkholderia dolosa
MNAPLPATALHATPWSAQEFEAHLRALESRYHIHHPFNRRLNSGACSPEQIRGWVANRFYYQISIPLKDAAILSNCPDRDTRRLWVQRILDHDGHGGDAGGIEAWARLGEAVGIPRSQLWSLERVLPGVRFAVDAYVNFARRAPWQEAVCSSLTEMFAPQIHLDRLAGWPSHYPWIDADGLQYFRSRVPLAQRDVEHGLAVTLRHFTTPEAQRRALDILSFKLDVLWSILDAIEKAYPA

SEQ ID NO: 210 - DNA, 732 bp, Polaromonas naphthalenivorans
tcatacgcaggctttctcgatgccgtcgagcatgctccacaggatgtcgagcttgaactgcaggatgtccagcgccctgtgctgcgcctggcgggtggtgaaatgggtgatggtgaccgccagcccgtgttccacatcgcggcttgccagcggaatacggctgcggaaataagtcaggccttcgggctcgatccaggcgtaatgcaaaggccagctggcaagccggtccttgtggatctggggtgcgaacatttcggtcagcgatgagcacacggcttcctgccacggtgctttcgcggcgaaattcacgtaggcatcgcaggcgaaccgcaccgccggcgccacgccctgcaacgaccacaattcctcacgcgacaggccgaccgccaggcccaactgggtccaggcttccatgccgccagcggcgcagccctggtagtcgccgtagccgtcatggtccagaatgcgttccacccacagtcggcggtgcgcccggtcaggcatgttggccaaaatcgccgcgtccttgcgcggaatgcacaactggtaataaaaacggttggccacccagcaacggatttcgtctgcggtgcagccgccctggttcatccgtacattgaagggatggtgaatgtgataggccgtgcctttggcgcgcagctgcctttcaaactcggcagggctccaggctgatctgctggcgtcaaagcagggtgattgggctatttccat

SEQ ID NO: 211 - protein, 243 aa, Polaromonas naphthalenivorans
MEIAQSPCFDASRSAWSPAEFERQLRAKGTAYHIHHPFNVRMNQGGCTADEIRCWVANRFYYQLCIPRKDAAILANMPDRAHRRLWVERILDHDGYGDYQGCAAGGMEAWTQLGLAVGLSREELWSLQGVAPAVRFACDAYVNFAAKAPWQEAVCSSLTEMFAPQIHKDRLASWPLHYAWIEPEGLTYFRSRIPLASRDVEHGLAVTITHFTTRQAQHRALDILQFKLDILWSMLDGIEKACV

SEQ ID NO: 212 - DNA, 741 bp, Rickettsiella grylli
atgccgactaaacgctgcgaagtatcattgtctcagagtgtatttgaaaaaaaaattttaaaccttgaaaaatattatcatatccatcatcctttcaatcaattaatgaacgatggccaattgactcggcaacaaattcaacagtgggtgattaatcgcttctattatcaagtcaatatccctgtaaaagatgctgctattttatccaattgtcctctacgggagatacgaagagaatgggtgaaacggatcattgaacacgatggcgatgtcattaatcccggtggaattgaagcctggctgacattgggagaagcgtgcggactgacgcgtaacttattgtggtctatgaaatatgtcctgccgggcgtgcgctttgcagtagacgcttacattcagtttacacgaacgcatccatggcaagctgcggtttgttcatcgttaacggagctttttgcacccgaaatccatcgccaacgtttaacgaattggcccatccattatccatggatggatttaaacgcattagcttattttcgttgtcgattaaatcaaatcaatcatcatgtcaaaaaaggcttacaatggacactcgaaaattttcaaacacacgaacagcaaacacaagcattggctattttaaaatttaaattagaaattctttggtcaatttcagacagcctttacttagcctatgtattaggtcaccctcccatcacattttcaaaggatgatacatga

SEQ ID NO: 213 - protein, 246 aa, Rickettsiella grylli
MPTKRCEVSLSQSVFEKKILNLEKYYHIHHPFNQLMNDGQLTRQQIQQWVINRFYYQVNIPVKDAAILSNCPLREIRREWVKRIIEHDGDVINPGGIEAWLTLGEACGLTRNLLWSMKYVLPGVRFAVDAYIQFTRTHPWQAAVCSSLTELFAPEIHRQRLTNWPIHYPWMDLNALAYFRCRLNQINHHVKKGLQWTLENFQTHEQQTQALAILKFKLEILWSISDSLYLAYVLGHPPITFSKDDT

SEQ ID NO: 214 - DNA, 732 bp, Methylibium petroleiphilum
ttgagcgccgacctgccctggtctcccgcagaattcgaggcacgcctgcgcgccaaggagtccgggtaccacatccaccaccccttcaacaagcggctcaacagcggcgcgctgcagcccttccaggtgcgcggctgggtggccaaccgcttctactaccagcaggcgatcccgatgaaggacgccgcggtcatggccaactgcgaggaccgcgccacgcggcgccgctggatcgagcgcatgctcgaccacgacggccatggcgatcacgaggggcagaacgccggcggtatcgagacctggacgcgcctgggcatggccgtgggcctgagccgcgaggacctctggtcgcaccgccacgttcagccgggcgtgcgcttcgcggtcgatgcctacgtgaacttcgcgcgccgcgcgccctggcgcgagggcgtgatctcctcgctgaccgagatgttcgcgcccaagatccacgccgaccggctggccggctggcccagcatgtacccgtggatcgccgccgagggcctggcctatttccgcagccgcatcccgctggcgcagcgcgacgtggagcacggcctggaggtcgccatcgcgttcggcgacacccgcgcgaagcaggagcgcgcgatcgagatcctgcagttcaagctcgacgtgctgtggtcgctgctcgacgccgtggagcgcgcctaccccgacgacctgcccgaggagcgccgaccgtga

SEQ ID NO: 215 - protein, 243 aa, Methylibium petroleiphilum
MSADLPWSPAEFEARLRAKESGYHIHHPFNKRLNSGALQPFQVRGWVANRFYYQQAIPMKDAAVMANCEDRATRRRWIERMLDHDGHGDHEGQNAGGIETWTRLGMAVGLSREDLWSHRHVQPGVRFAVDAYVNFARRAPWREGVISSLTEMFAPKIHADRLAGWPSMYPWIAAEGLAYFRSRIPLAQRDVEHGLEVAIAFGDTRAKQERAIEILQFKLDVLWSLLDAVERAYPDDLPEERRP

SEQ ID NO: 216 - DNA, 639 bp, Nitrococcus mobilis
atgatgatgaatcgcggcgaactctcgcgacaccaactccagggttgggttgccaaccgctattattaccaaatcagcatcccactgaaagacgcggcactgatctcccaatgtccggatcgggccgtgcggcggcactggctgcacaggctcctcgatcaggacggccgcacgggcagcgaaggggggatcgaagcatggatcaacctcggcgaggccgtcggcctgagccggacagagctgatctccgagcgtcaggttttgcctggtgttcgattcgcggtggacgcctatgtaaatttggtgcgctgggggtcttggcaggacggggtgtgcgcctcgctcaccgagctgttcgcgccgggcatccatcgcgaacgtctgaacagctggccgactcactatccctgggtcgatcccgccggcttagcctattttcgcagccgcctcgaagtagcccggcaagacgggcggcacggactcgctttggtactcgatcattgcgacaccccggcaagccaggatcgcgcggtgcgcatcgtcaagttcaaactcgaagttctctgggccatgctcgatgcgatgtacctggcctatgtggtaggcatgccgccgttttttaacgtcgcgggcgactga

SEQ ID NO: 217 - protein, 212 aa, Nitrococcus mobilis
MMMNRGELSRHQLQGWVANRYYYQISIPLKDAALISQCPDRAVRRHWLHRLLDQDGRTGSEGGIEAWINLGEAVGLSRTELISERQVLPGVRFAVDAYVNLVRWGSWQDGVCASLTELFAPGIHRERLNSWPTHYPWVDPAGLAYFRSRLEVARQDGRHGLALVLDHCDTPASQDRAVRIVKFKLEVLWAMLDAMYLAYVVGMPPFFNVAGD

SEQ ID NO: 218 - DNA, 717 bp, Mycobacterium smegmatis
tcagcgatttccataagcctggtcgatcgcatcgagcatgctccacagcacgtcgcacttgaaggacaaggccgacagcgcggccgtctgggtttcctgcgtgacgcaatgccgtcgcaccacctcaagaccgtgttcggagtcgcggggcgcctgggtgatgcgagatctgaagtaagagagttctttcgggtcgatccaggtgtagtgacgttcgaacgccgcgagccgctcggccatcaggtcgggtgcgaacagctcggtcagcgacgaggccaccgcctccagccatggccgggtgcgggtgaagttcacgtaggcgtcgacggcgaagcgcacgcccggcagcaggtgtcgtgcgtcttcgacctccgccctggtcaaaccgaccgcttcggccagtcgcagccacgcctcgattcccccggttccttcggtcgtgccgtcgtggtcgatgattcgctggacccaacggcgccgtatctcacggtccgggcaggtgctgaggatcgctgcgtctttccgggggatgttcacctggtagtagaagcggttggccacccacccgcggatctcctcggggctgcactgcccggtgttcatccgacggtggaagggatgcaggtggtggtaatccttgacgtgctcgcgaagcgcttcctcgaactcgtcgggcgtcagtgcctgggttactgctcctcgcgccagcggtgccat

SEQ ID NO: 219 - protein, 238 aa, Mycobacterium smegmatis
MAPLARGAVTQALTPDEFEEALREHVKDYHHLHPFHRRMNTGQCSPEEIRGWVANRFYYQVNIPRKDAAILSTCPDREIRRRWVQRIIDHDGTTEGTGGIEAWLRLAEAVGLTRAEVEDARHLLPGVRFAVDAYVNFTRTRPWLEAVASSLTELFAPDLMAERLAAFERHYTWIDPKELSYFRSRITQAPRDSEHGLEVVRRHCVTQETQTAALSALSFKCDVLWSMLDAIDQAYGNR

SEQ ID NO: 220 - DNA, 690 bp, Saccharopolyspora erythraea
tcagtcggcgtacgcgtggtcgatggcatcgagaatgctccacaggacatcgcatttgaacgacagggccgccacggctcgtgcctgctcgtcggccgaccggcagtgttcggtcaccacctgcagggcgtgttcggagtcgcggggagcctgctccaggcgggcccggaagtaaccgagaccgccggggtcgatccacggatagcagcgctcgaacgcggcgaggcgctgcgccatcaggtccggtgcgaacagctcggtcaacgacgacgccaccgcctcggtccacggccgggtgcgggcgaaggtgacgtaggcgtcgacggcgaaccgcacgccggggacgacatgccgttcgtcgagcacttcctcgcgggtcaggccgaccgcctcggccaggtgcaaccaggcgtcgataccgcctcgcccgcccggcgcgccgtcgtggtcgaggatccgccgcacccagcgcctgcgcacctcgcggtcggggcagttggacaggatcgcggcgtccttgagcgggatgctctcctggtagtagaagcggttggccacccacccctggatctggcggcggctcagccgtcccccgttcatcctgacgtggaacgggtgctggtcgtggtagcgccgcgactgcgcgcgcaacgccgcgacgaagccgtcggtgccggtgagcgccgccat

SEQ ID NO: 221 - protein, 229 aa, Saccharopolyspora erythraea
MAALTGTDGFVAALRAQSRRYHDQHPFHVRMNGGRLSRRQIQGWVANRFYYQESIPLKDAAILSNCPDREVRRRWVRRILDHDGAPGGRGGIDAWLHLAEAVGLTREEVLDERHVVPGVRFAVDAYVTFARTRPWTEAVASSLTELFAPDLMAQRLAAFERCYPWIDPGGLGYFRARLEQAPRDSEHALQVVTEHCRSADEQARAVAALSFKCDVLWSILDAIDHAYAD

SEQ ID NO: 222 - DNA, 759 bp, Sagittula stellata
atgaccaaggcaccgcaatcgcgcgacgcgttcgaagcccggctgcgccagatcggagcggagcgatatcacgacctgcatccgttccacgaccgtctgcacggtgggcagtgtaccatggaggaggtgcaggcctgggtcatcaaccgctactactaccagcactcgatcccgatgaaggacgcggccttcatgtcccgggtggaggaccctgatttgcgccgcgcgtggaggtcgcggatggaggatcacgacggaaccgccgacaacgaaggcggcataaggcgctggctgcggctggcggaggcggtgggtctggatcccgactacgtctcgacgacagagggcgtcctgcccgcaacgaagttcgcggtggacgcctacgtccgtttcgtccgcgaaaagaccctgctcgaagcggtggcggcatcactcacggaactcttcgcaccgaagatccacgccaaccgcatcgagggactgctgaagaattacgccttcgccgacgactcctcgctgtcgtatttccgcaaccggttgaaagaagcgccgaaggatgtggcctttgggctggcctgggtgctggaccatgccgacaccgccgagaagcaggacgtggcggccagggcgctgatcttcaagacggatgttctgtggtcccaactcgacgcgctgtggggcgcctacgtcgagccgcggcgcattccgcccggcgcgtggcagcccggaacggggcagctcttgcggcaggcgtcatga

SEQ ID NO: 223 - protein, 252 aa, Sagittula stellata
MTKAPQSRDAFEARLRQIGAERYHDLHPFHDRLHGGQCTMEEVQAWVINRYYYQHSIPMKDAAFMSRVEDPDLRRAWRSRMEDHDGTADNEGGIRRWLRLAEAVGLDPDYVSTTEGVLPATKFAVDAYVRFVREKTLLEAVAASLTELFAPKIHANRIEGLLKNYAFADDSSLSYFRNRLKEAPKDVAFGLAWVLDHADTAEKQDVAARALIFKTDVLWSQLDALWGAYVEPRRIPPGAWQPGTGQLLRQAS

SEQ ID NO: 224 - DNA, 771 bp, Sinorhizobium meliloti
gtgacgacggcaactgacagacaagctttccatgcccgcctgctggagatcggcaaggagcgctaccatgacaagcatccgtttcatgcgatgctccatggcggcggttgcacgacgacgcaagtccgcgcctgggtgatcaaccgctattattaccagagccgcatccccatgaaggatgcggcctttctgtcgcgttgcgacgacccggatatgcgccgggcctggcgctcccgcatcgaagatcacgacggcggcgtcgaggagggcggcggcatccggcgctggctgcgtctcgccgaggccgtgggactcgatccagcctatgtcggctccgcaaggggcgtactgccgtcgacccggtttgccgtggacgcctatgtttcctttgtgcgtgagaagccgctgctcgaggcggtggcctcctcgctgacggagctttttgcgccgaagatccactcggagcgcattgccgggctgctggagcactacgccttcgccgatgacgcggcgctcgcctacttccgccagaggctggcggaggtgccccgggatgtcgagttcggcctcgcctatgtccttgaccatgccgacacgcgggaaaagcaggacgcggccgctcaggcactcaccttcaagacggatgttctctgggcccagctcgatgcactttattcggcctatgtcacgccggggcgcattccgccgggggcctgggacggccgggagggggtgatccgcgagccgagagcgcgggaggccgcggaatga

SEQ ID NO: 225 - protein, 256 aa, Sinorhizobium meliloti
MTTATDRQAFHARLLEIGKERYHDKHPFHAMLHGGGCTTTQVRAWVINRYYYQSRIPMKDAAFLSRCDDPDMRRAWRSRIEDHDGGVEEGGGIRRWLRLAEAVGLDPAYVGSARGVLPSTRFAVDAYVSFVREKPLLEAVASSLTELFAPKIHSERIAGLLEHYAFADDAALAYFRQRLAEVPRDVEFGLAYVLDHADTREKQDAAAQALTFKTDVLWAQLDALYSAYVTPGRIPPGAWDGREGVIREPRAREAAE

SEQ ID NO: 226 - DNA, 1416 bp, Oryza sativa; identical to SEQ ID NO: 101

SEQ ID NO: 227 - DNA, 2194 bp, Oryza sativa
aatccgaaaagtttctgcaccgttttcaccccctaactaacaatatagggaacgtgtgctaaatataaaatgagaccttatatatgtagcgctgataactagaactatgcaagaaaaactcatccacctactttagtggcaatcgggctaaataaaaaagagtcgctacactagtttcgttttccttagtaattaagtgggaaaatgaaatcattattgcttagaatatacgttcacatctctgtcatgaagttaaattattcgaggtagccataattgtcatcaaactcttcttgaataaaaaaatctttctagctgaactcaatgggtaaagagagagattttttttaaaaaaatagaatgaagatattctgaacgtattggcaaagatttaaacatataattatataattttatagtttgtgcattcgtcatatcgcacatcattaaggacatgtcttactccatcccaatttttatttagtaattaaagacaattgacttatttttattatttatcttttttcgattagatgcaaggtacttacgcacacactttgtgctcatgtgcatgtgtgagtgcacctcctcaatacacgttcaactagcaacacatctctaatatcactcgcctatttaatacatttaggtagcaatatctgaattcaagcactccaccatcaccagaccacttttaataatatctaaaatacaaaaaataattttacagaatagcatgaaaagtatgaaacgaactatttaggtttttcacatacaaaaaaaaaaagaattttgctcgtgcgcgagcgccaatctcccatattgggcacacaggcaacaacagagtggctgcccacagaacaacccacaaaaaacgatgatctaacggaggacagcaagtccgcaacaaccttttaacagcaggctttgcggccaggagagaggaggagaggcaaagaaaaccaagcatcctccttctcccatctataaattcctccccccttttcccctctctatataggaggcatccaagccaagaagagggagagcaccaaggacacgcgactagcagaagccgagcgaccgccttctcgatccatatcttccggtcgagttcttggtcgatctcttccctcctccacctcctcctcacagggtatgtgcctcccttcggttgttcttggatttattgttctaggttgtgtagtacgggcgttgatgttaggaaaggggatctgtatctgtgatgattcctgttcttggatttgggatagaggggttcttgatgttgcatgttatcggttcggtttgattagtagtatggttttcaatcgtctggagagctctatggaaatgaaatggtttagggatcggaatcttgcgattttgtgagtaccttttgtttgaggtaaaatcagagcaccggtgattttgcttggtgtaataaagtacggttgtttggtcctcgattctggtagtgatgcttctcgatttgacgaagctatcctttgtttattccctattgaacaaaaataatccaactttgaagacggtcccgttgatgagattgaatgattgattcttaagcctgtccaaaatttcgcagctggcttgtttagatacagtagtccccatcacgaaattcatggaaacagttataatcctcaggaacaggggattccctgttcttccgatttgctttagtcccagaattttttttcccaaatatcttaaaaagtcactttctggttcagttcaatgaattgattgctacaaataatgcttttatagcgttatcctagctgtagttcagttaataggtaatacccctatagtttagtcaggagaagaacttatccgatttctgatctccatttttaattatatgaaatgaactgtagcataagcagtattcatttggattattttttttattagctctcaccccttcattattctgagctgaaagtctggcatgaactgtcctcaattttgttttcaaattcacatcgattatctatgcattatcctcttgtatctacctgtagaagtttctttttggttattccttgactgcttgattacagaaagaaatttatgaagctgtaatcgggatagttatactgcttgttcttatgattcatttcctttgtgcagttcttggtgtagcttgccactttcaccagcaaagttc

SEQ ID NO: 228 - DNA, 55 bp, Artificial sequence
  primer: prm08777
ggggacaagtttgtacaaaaaagcaggcttaaacaatgactgacaccccaatgtc

SEQ ID NO: 229 - DNA, 51 bp, Artificial sequence
  primer: prm08782
ggggaccactttgtacaagaaagctgggttcataaggtgattcctttatgc

SEQ ID NO: 230 - protein, 13 aa, Artificial Sequence
  PEPC polypeptide motif I
QEIMVGYSDSNKD

SEQ ID NO: 231 - protein, 20 aa, Artificial Sequence
  PEPC polypeptide motif II
FHGRGGSVGRGGGPAYKAIL

SEQ ID NO: 232 - protein, 8 aa, Artificial Sequence
  PEPC polypeptide motif III
LRAIPWVF

SEQ ID NO: 233 - protein, 10 aa, Artificial Sequence
  PEPC polypeptide motif IV
GIAAGMRNTG

SEQ ID NO: 234 - protein, 13 aa, Artificial Sequence
  PEPC polypeptide motif I
  misc_feature (3)..(3): Xaa is Val or Ile
  misc_feature (5)..(5): Xaa is Ile, Leu or Val
  misc_feature (11)..(11): Xaa is Gly, Asn or Ser
  misc_feature (13)..(13): Xaa is Asp or Phe
QEXMXGYSDSXKX

SEQ ID NO: 235 - protein, 20 aa, Artificial Sequence
  PEPC polypeptide motif II
  misc_feature (7)..(7): Xaa is Thr or Ser
  misc_feature (8..(8): Xaa is Val or Ile
  misc_feature (15)..(15): Xaa is Thr, Ser or Ala
  misc_feature (16..(16): Xaa is His or Tyr
  misc_feature (17..(17): Xaa is Leu, Ile, Glu, Asp or Lys
  misc_feature (20)..(20): Xaa is Leu, Gln or Val
FHGRGGXXGRGGGPXXXAIX

SEQ ID NO: 236 - protein, 8 aa, Artificial Sequence
  PEPC polypeptide motif III
  misc_feature (7)..(7): Xaa is Ile, Leu or Val
LRAIPWXF

SEQ ID NO: 237 - protein, 10 aa, Artificial Sequence
  PEPC polypeptide motif IV
  misc_feature (2)..(2): Xaa is Ile or Val
  misc_feature (3)..(3): Xaa is Ala or Ser
  misc_feature (6)..(6): Xaa is Leu or Met
  misc_feature (7)..(7): Xaa is Gln, Arg or Lys
  misc_feature (9)..(9): Xaa is Thr or Ser
GXXAGXXNXG

SEQ ID NO: 238 - protein, 9 aa, Artificial Sequence
  PEPC polypeptide motif V
SGFLSSNWE

SEQ ID NO: 239 - protein, 9 aa, Artificial Sequence
  PEPC polypeptide motif V
  misc_feature (1)..(1): Xaa is Ser or Gly
  misc_feature (3)..(3): Xaa is Phe or Ile
  misc_feature (4)..(4): Xaa is Leu, Thr or Val
  misc_feature (5)..(5): Xaa is Ser or Thr
  misc_feature (7)..(7): Xaa is Asn, Gln or Gly
XGXXXSXWE

SEQ ID NO: 240 - protein, 10 aa, Artificial Sequence
  PEPC polypeptide motif VI
SYKEWPEDKR

SEQ ID NO: 241 - protein, 10 aa, Artificial Sequence
  PEPC polypeptide motif VI
  misc_feature (1)..(1): Xaa is Ser or Thr
  misc_feature (3)..(3): Xaa is Ser, Leu, Lys, Ala, Arg, or Gln
  misc_feature (4)..(4): Xaa is Glu, Lys, or Asp
  misc_feature (6)..(6): Xaa is Ser, Pro, Thr or Asp
  misc_feature (8)..(8): Xaa is Glu or Asp
  misc_feature (9)..(9): Xaa is Arg, Gly, Lys or Gln
  misc_feature (10)..(10): Xaa is Arg or Lys
XYXXWXEXXX

SEQ ID NO: 242 - protein, 14 aa, Artificial Sequence
  Class III U-Box polypeptide motif VII
  misc_feature (3)..(3): Xaa is Thr or Ser
  misc_feature (7)..(7): Xaa is Glu, Ser, Asp or Ala
  misc_feature (8)..(8): Xaa is Asn, Ser, Gly or Ala
  misc_feature (10)..(10): Xaa is Glu or Ala
  misc_feature (11)..(11): Xaa is Lys, Arg or Met
  misc_feature (13)..(13): Xaa is Leu, Met, Val or Ile
  misc_feature (14)..(14): Xaa is Phe, Leu or Ala
GIXYDRXXIXXWXX

SEQ ID NO: 243 - protein, 8 aa, Artificial Sequence
  Class III U-Box polypeptide motif VIII
  misc_feature (2)..(2): Xaa is Ser, Ala or Gly
  misc_feature (4)..(4): Xaa is Cys, Gly or Ala
  misc_feature (5)..(5): Xaa is Ile, Arg, Ala or Thr
  misc_feature (6)..(6): Xaa is Ser, Val, Leu, Arg or Ala
  misc_feature (7)..(7): Xaa is His, Asn, Arg or Val
  misc_feature (8)..(8): Xaa is Ala, Cys or Ser
QXWXXXXX

SEQ ID NO: 244 - protein, 8 aa, Artificial Sequence
  Class III U-Box polypeptide motif IX
  misc_feature (3)..(3): Xaa is Ser, Ala, or Leu
  misc_feature (4)..(4): Xaa is Ala or Glu
  misc_feature (5)..(5): Xaa is Leu or Phe
  misc_feature (6)..(6): Xaa is Leu or Val
  misc_feature (7)..(7): Xaa is Ser, Lys, Asn or Ala
GRXXXXXH

SEQ ID NO: 245 - protein, 13 aa, Artificial Sequence
  Class III U-Box polypeptide motif X
  misc_feature (1)..(1): Xaa is Gly or Ala
  misc_feature (2)..(2): Xaa is Ile, Leu or Val
  misc_feature (4)..(4): Xaa is Ala, Ile or Val
  misc_feature (6)..(6): Xaa is Ser, Cys, Ala, Gly or Thr
  misc_feature (7)..(7): Xaa is Lys, Cys or Arg
  misc_feature (8)..(8): Xaa is Arg, Lys or Ala
  misc_feature (9)..(9): Xaa is Ala, Ile, Val or Thr
  misc_feature (10)..(10): Xaa is Met, Leu or Thr
  misc_feature (12)..(12): Xaa is Val, Leu or Ile
  misc_feature (13)..(13): Xaa is Ser or Pro
XXAXVXXXXXRXX

SEQ ID NO: 246 - protein, 9 aa, Artificial Sequence
  Class III U-Box polypeptide motif XI
  misc_feature (1)..(1): Xaa is Lys or Arg
  misc_feature (3)..(3): Xaa is Cys or Leu
  misc_feature (4)..(4): Xaa is Phe, Val, Met or Leu
  misc_feature (5)..(5): Xaa is Val, Leu or Ala
  misc_feature (6)..(6): Xaa is Val, Leu, Ala or Ile
  misc_feature (7..(7): Xaa is Gln or Arg
  misc_feature (8)..(8): Xaa is Val, Ala or Ser
  misc_feature (9)..(9): Xaa is Asp, Ser, Gly or Glu
XLXXXXXXX

1. A method for enhancing yield-related traits in plants relative to control plants, comprising modulating expression in a plant of a nucleic acid encoding a yield increasing polypeptide selected from the group consisting of:
phosphoenolpyruvate carboxylase (PEPC),
Class III U-Box protein and
PQQC protein.

2. The method of claim 1, wherein said yield increasing polypeptide is selected from the group consisting of SEQ ID NO: 2, SEQ ID NO: 75, and SEQ ID NO: 105 and orthologues and paralogues thereof.

3. The method of claim 1, wherein said yield increasing protein has a C-terminal region having at least 70% or more sequence identity to the C-terminal region of the polypeptide selected from the group consisting of SEQ ID NO: 2, SEQ ID NO: 75 and SEQ ID NO: 105.

4. The method of claim 1, wherein said PEPC protein comprises one or more of the following motifs:
Motif I: QEIMVGYSDSNKD (SEQ ID NO: 230), or a motif having at least 65% identity to Motif I;
Motif II: FHGRGGSVGRGGGPAYKAIL (SEQ ID NO: 231), or a motif having at least 65% identity to Motif II;
Motif III: LRAIPWVF (SEQ ID NO: 232), or a motif having, in increasing order of preference, at least 65% identity to Motif III;
Motif IV: GIAAGMRNTG (SEQ ID NO: 233), or a motif having at least 65% identity to Motif IV;
Motif V: SGFLSSNWE (SEQ ID NO: 238), or a motif having at least 65% identity to Motif V;
Motif VI: SYKEWPEDKR (SEQ ID NO: 240), or a motif having at least 65% identity to Motif VI.

5. The method of claim 4, wherein
Motif I comprises QE V/I M I/L/V GYSDS G/N/S K D/F
(SEQ ID NO: 234);
Motif II comprises FHGRGG T/S V/I GRGGGP T/S/A H/Y
L/I/E/D/K AI L/Q/V (SEQ ID NO: 235);
Motif III is comprises LRAIPW I/L/V F
(SEQ ID NO: 236);
Motif IV is comprises G I/V A/S AG L/M Q/R/K N T/S G
(SEQ ID NO: 237);
Motif V is comprises S/G G F/I L/T/V S/T S N/Q/G WE
(SEQ ID NO: 239);
Motif VI is comprises S/T Y S/L/K/A/R/Q E/K/D W
S/P/T/D E E/D R/G/K/Q R/K (SEQ ID NO: 241).

6. The method of claim 1, wherein said modulated expression is effected by introducing and expressing in a plant a nucleic acid encoding a yield increasing polypeptide selected from the group consisting of: PEPC, Class III U-Box, and PQQC polypeptide.

7. The method of claim 1, wherein said nucleic acid encoding a yield increasing polypeptide selected from the group consisting of: PEPC, Class III U-Box, and PQQC polypeptide encodes any one of the proteins listed in Table A or is a portion of said nucleic acid, or a nucleic acid capable of hybridising with said nucleic acid.

8. The method of claim 1, wherein said enhanced yield-related traits comprise one or more of the following, increased aboveground area, increased emergence vigour, increased total number of seeds, increased seed weight, increased fill rate, increased number of flowers per panicle, increased number of seeds, increased harvest index, increased height and an increase in the root thickness, each relative to a control plant.

9. The method of claim 1, wherein said enhanced yield-related traits are obtained under non-stress conditions and under mild drought conditions.

10. The method of claim 1, wherein said enhanced yield-related traits are obtained under conditions of nitrogen deficiency.

11. The method of claim 1, wherein said nucleic acid is operably linked to a young green tissue-specific promoter.

12. The method of claim 1, wherein said nucleic acid encoding a PEPC polypeptide is of bacterial or plant origin.

13. A plant or part thereof, including seeds, obtained by the method of claim 1, wherein said plant or part thereof comprises a recombinant nucleic acid encoding a yield increasing polypeptide selected from the group consisting of: PEPC, Class III U-Box, and PQQC polypeptide.

14. A construct comprising:
(i) a nucleic acid encoding a yield increasing polypeptide selected from the group consisting of: PEPC, Class III U-Box, and PQQC polypeptide;
(ii) one or more control sequences capable of driving expression of the nucleic acid sequence of (a); and optionally
(iii) a transcription termination sequence.

15. The construct of claim 13, wherein one of said control sequences is a young green tissue specific promoter.

16. A method for making plants having one or more of the following: increased aboveground area, increased emergence vigour, increased total number of seeds, increased seed weight, increased fill rate, increased number of flowers per panicle, increased number of seeds, increased harvest index, increased height and an increase in the root thickness, each relative to a control plant comprising transforming a plant with the construct of claim 13.

17. A plant, plant part or plant cell transformed with the construct of claim 13.

18. A method for the production of a transgenic plant having increased yield, increased biomass and/or increased seed yield relative to a control plant, comprising:
(i) introducing and expressing in a plant a nucleic acid encoding a yield increasing polypeptide selected from the group consisting of: PEPC, Class III U-Box, and PQQC polypeptide; and
(ii) cultivating the plant cell under conditions promoting plant growth and development.

19. A transgenic plant having one or more of the following: increased aboveground area, increased emergence vigour, increased total number of seeds, increased seed weight, increased fill rate, increased number of flowers per panicle, increased number of seeds, increased harvest index, increased height and an increase in the root thickness, each relative to control plants, resulting from increased expression of a nucleic acid encoding a yield increasing polypeptide selected from the group consisting of: PEPC, Class III U-Box, and PQQC polypeptide, or a transgenic plant cell derived from said transgenic plant.

20. The transgenic plant of claim 12, or a transgenic plant cell derived thereof, wherein said plant is a crop plant, a monocot, or a cereal.

21. Harvestable parts of the plant of claim 19, wherein said harvestable parts comprise shoot biomass and/or seeds.

22. Products derived from the plant of claim 19 and/or from harvestable parts of said plant.

23. (canceled)

24. The transgenic plant of claim 12 or a transgenic plant cell derived thereof, wherein the plant is selected from the group consisting of rice, maize, wheat, barley, millet, rye, triticale, sorghum, and oats.
